(19) United States
(12) Patent Application Publication
(10) Pub. No.: US 2024/0197918 A1
(43) Pub. Date: Jun. 20, 2024

(54) TISSUE-TARGETED MODIFIED AAV CAPSIDS AND METHODS OF USE THEREOF

(71) Applicant: Locanabio, Inc., San Diego, CA (US)

(72) Inventor: Greg NACHTRAB, San Diego, CA (US)

(73) Assignee: Locanabio, Inc., San Diego, CA (US)

(21) Appl. No.: 18/287,963

(22) PCT Filed: Apr. 22, 2022
(86) PCT No.: PCT/US2022/026048

§ 371 Date: Oct. 23, 2023

Related U.S. Application Data
(60) Provisional application No. 63/299,697, filed on Jan. 14, 2022.
(60) Provisional application No. 63/178,965, filed on Apr. 23, 2021.

(51) Int. Cl. A61K 48/00; C07K 14/005; C12N 15/86

(52) U.S. Cl. CPC A61K 48/0058; C07K 14/005; C12N 15/86; C12N 2750/14122; C12N 2750/14143; C12N 2750/14145

(57) ABSTRACT

Provided herein are modified AAV capsids comprising modified AAV capsid proteins having improved transduction in muscle tissue, reduced immunogenicity, reduced neutralizing antibody binding, reduced liver tissue transduction, and combinations thereof. Also provided are methods of treating a patient with AAV viral vectors comprising modified AAV capsid proteins.

### FIELD OF THE DISCLOSURE

[0001] The disclosure is directed to molecular biology, gene therapy, and compositions and methods for enhancing transduction of AAV capsids comprising modified AAV capsid proteins. In particular, modified AAV capsids comprising modified AAV capsid proteins are provided having enhanced transduction is muscle tissue and/or reduced transduction in liver tissue.

### CROSS-REFERENCE TO RELATED APPLICATIONS

[0002] This application claims priority to, and the benefit of, U.S. Provisional Application No. 63/178,965 filed Apr. 23, 2021 and U.S. Provisional Application No. 63/299,697 filed Jan. 14, 2022. The contents of each of which is hereby incorporated by reference in their entireties.

### INCORPORATION BY REFERENCE OF SEQUENCE LISTING

[0003] The contents of the text file named “LOCN_011_001WO_SeqList_ST25”, which was created on Apr. 21, 2022 and is 1.33 MB in size, are hereby incorporated by reference in their entirety.

### BACKGROUND

[0004] Adeno-associated virus (AAV) vector-based therapeutics can have limited transduction in specific tissue types and transduction can be limited due to pre-existing neutralizing antibodies (NAb) specific for specific AAV serotypes.

[0005] In particular, AAV8 and AAV9 are commonly used vectors for therapies delivered for skeletal muscle transduction via systemic injection. However, these serotypes also transduce the liver and a significant percentage of the patient population has a moderate to high NAb titer against AAV8 or AAV9. As such, there exists a need for the development of AAV capsids having modified AAV capsid protein having enhanced tissue-specific transduction in a desired tissue and/or reduced transduction in a non-desired tissue. In some aspects, it is desired to have enhanced transduction in muscle tissue and/or reduced transduction in liver tissue.

[0006] Disclosed herein are AAV capsids comprised of modified and chimeric AAV capsid protein sequences with enhanced muscular, transduction, as well as decreased transduction in liver tissue. In some aspects, AAV capsids comprised of modified and chimeric AAV capsid protein sequences have reduced sensitivity to pre-existing neutralizing antibodies.

### SUMMARY

[0007] The disclosure provides a modified AAV capsid protein comprising a modified variable region (VR) VIII. In some aspects, the capsid protein is a VP1, VP2, or VP3 capsid protein. In some aspects, the modified VR VIII comprises a peptide insertion.

[0008] In some aspects, the peptide insertion comprises an RGD-motif peptide insertion. In some aspects, the RGD-motif insertion comprises RGDLGLS (SEQ ID NO: 303), RGDLSTP (SEQ ID NO: 304), SNSRGDYNSL (SEQ ID NO: 305), ENRRGDFNNT (SEQ ID NO: 306), SRGDYNSL (SEQ ID NO: 307), RGDYNSL (SEQ ID NO: 308), RGDLST (SEQ ID NO: 309), or RGDYVGL (SEQ ID NO: 310).

[0009] In some aspects, the RGD-motif insertion comprises a variable domain of camelid heavy-chain-only antibody (VHH) RGD peptide. In some aspects, the VHH RGD peptide comprises an amino acid sequence at least 85%, 90%, 95%, 96%, 97%, 98%, 99% or 100% identical to the amino acid sequence EVQLQASGGGFVQAGGSLRLSCAVSGRGDLSTPSYGMHWVRQAPGKEREFVAGISR GDYNSLYYADSVQGRFTISRDNAKNTVYLQMNSLKPEDTATYYCAENRRGDFNNT YWGQGTQVTVSS (SEQ ID NO: 316).

[0010] In some aspects, the peptide insertion comprises an acetylcholinesterase collagenic tail (ColQ) peptide. In some aspects, the ColQ peptide comprises an amino acid sequence at least 85%, 90%, 95%, 96%, 97%, 98%, 99% or 100% identical to the amino acid sequence TPFYPVGYTVKQPGTCGDGVLQPGEECDDGNPDVSDGCIDCHRAYCGDGYRHQGV EDCDGSDFGYLTCETYLPGSYGDLRCTQYCSIDSTPCRYFT (SEQ ID NO: 302).

[0011] In some aspects, the peptide insertion comprises one or more linker sequences at the N-terminus or C-terminus of the inserted peptide. In some aspects, the linker sequence comprises GGGGS (SEQ ID NO: 311), GGGGSGGGGS (SEQ ID NO: 312); GGGGSGGGGSGGGGS(SEQ ID NO: 313); GGGGSGGGGSGGGGSGGGGS (SEQ ID NO: 314); or GGGGSGGGGSGGGGSGGGGSGGGGS (SEQ ID NO: 315).

[0012] In some aspects, the AAV serotype is AAV9 or AAVRh74.

[0013] In some aspects, the modified AAV capsid protein further comprises one or more amino acid mutations. In some aspects, the one or more amino acid mutations reduce liver transduction. In some aspects, the mutations comprise: i) at least one of F503I, G507I, Y707C and/or Y708C of Rh74, or ii) N498I of AAV9.

[0014] In some aspects, the capsid protein comprises an amino acid sequence at least 85%, 90%, 95%, 96%, 97%, 98%, 99% or 100% identical to the amino acid sequence set forth in any one of SEQ ID NOs: 53, 75, 102, 124, 245, 249, 255, 258, 262, or 267.

[0015] The disclosure provides a modified AAV capsid protein comprising an amino acid sequence at least 85%, 90%, 95%, 96%, 97%, 98%, 99% or 100% identical to the amino acid sequence set forth in any one of SEQ ID NOs: 53, 75, 102, 124, 245, 249, 255, 258, 262, or 267.

[0016] In some aspects, the capsid protein is encoded by a nucleic acid sequence at least 85%, 90%, 95%, 96%, 97%, 98%, 99% or 100% identical to the amino acid sequence set forth in any one of SEQ ID NOs: 151, 173, 199, 221, 270, 274, 280, 283, 287, or 292.

[0017] The disclosure provides an AAV capsid comprising one or more AAV capsid proteins according to any embodiment of the disclosure.

[0018] In some aspects, the AAV capsid has enhanced transduction in a targeted tissue or cell type relative to other tissue or cell types. In some aspects, the targeted tissue type is muscular tissue or muscle cells. In some aspects, the AAV capsid has enhanced transduction in muscle tissue. In some aspects, the AAV capsid has reduced transduction in non-targeted tissues or cell types. In some aspects, the non-targeted tissues include liver, lung, kidney, brain, spleen, intestine, spinal cord, or reproductive organs.

[0019] In some aspects, the transduction in muscle tissue is enhanced by at least about 10%, about 20%, about 30%, about 40%, about 50%, about 100%, about 200%, or about 300% compared the parental and/or unmodified AAV capsid.

[0020] In some aspects, the capsid comprises: i) a VP1 capsid protein comprising an amino acid sequence at least 85%, 90%, 95%, 96%, 97%, 98%, 99% or 100% identical to the amino acid sequence set forth in SEQ ID NO: 53; and ii) a VP2/VP3 capsid protein comprising an amino acid sequence at least 85%, 90%, 95%, 96%, 97%, 98%, 99% or 100% identical to the amino acid sequence set forth in SEQ ID NO: 102.

[0021] In some aspects, the capsid comprises: i) a VP1 capsid protein comprising an amino acid sequence at least 85%, 90%, 95%, 96%, 97%, 98%, 99% or 100% identical to the amino acid sequence set forth in SEQ ID NO: 75; and ii) a VP2/VP3 capsid protein comprising an amino acid sequence at least 85%, 90%, 95%, 96%, 97%, 98%, 99% or 100% identical to the amino acid sequence set forth in SEQ ID NO: 124.

[0022] In some aspects, the capsid comprises: i) a VP1 capsid protein comprising an amino acid sequence at least 85%, 90%, 95%, 96%, 97%, 98%, 99% or 100% identical to the amino acid sequence set forth in SEQ ID NO: 245; and ii) a VP2/VP3 capsid protein comprising an amino acid sequence at least 85%, 90%, 95%, 96%, 97%, 98%, 99% or 100% identical to the amino acid sequence set forth in SEQ ID NO: 258.

[0023] In some aspects, the capsid comprises: i) a VP1 capsid protein comprising an amino acid sequence at least 85%, 90%, 95%, 96%, 97%, 98%, 99% or 100% identical to the amino acid sequence set forth in SEQ ID NO: 249; and ii) a VP2/VP3 capsid protein comprising an amino acid sequence at least 85%, 90%, 95%, 96%, 97%, 98%, 99% or 100% identical to the amino acid sequence set forth in SEQ ID NO: 262.

[0024] In some aspects, the capsid comprises: i) a VP1 capsid protein comprising an amino acid sequence at least 85%, 90%, 95%, 96%, 97%, 98%, 99% or 100% identical to the amino acid sequence set forth in SEQ ID NO: 255; and ii) a VP2/VP3 capsid protein comprising an amino acid sequence at least 85%, 90%, 95%, 96%, 97%, 98%, 99% or 100% identical to the amino acid sequence set forth in SEQ ID NO: 267.

[0025] The disclosure provides a vector comprising a nucleic acid sequence encoding a modified AAV capsid protein of the disclosure.

[0026] In some aspects, the nucleic acid sequence encoding a modified AAV capsid protein is operably linked to regulatory element that controls expression of the capsid protein in a host cell.

[0027] The disclosure provides an AAV viral vector comprising a modified capsid protein of the disclosure or an AAV capsid of the disclosure.

[0028] In some aspects, the AAV viral vector comprises a recombinant AAV (rAAV) vector encoding a therapeutic transgene or nucleotide sequence of interest (NOI).

[0029] The disclosure provides a cell comprising a vector of the disclosure or the AAV viral vector of the disclosure.

[0030] The disclosure provides a pharmaceutical composition comprising an AAV viral vector of claim the disclosure and at least one pharmaceutically acceptable excipient and/or additive.

[0031] The disclosure provides a method of providing a therapeutic transgene or protein to a subject, comprising administering to the subject an AAV viral vector of the disclosure or a pharmaceutical composition of the disclosure.

[0032] The disclosure provides a method of treating a subject having a disease and/or disorder, the method comprising administering to the subject at least one therapeutically effective amount of an AAV viral vector of the disclosure or a pharmaceutical composition of the disclosure. In some aspects, the disease and/or disorder is a muscular and/or neuromuscular disorder. In some aspects, the muscular and/or neuromuscular disorder is muscular dystrophy or myotonic dystrophy.

[0033] In some aspects, the AAV viral vector or the pharmaceutical composition is administered to the subject intravenously, intrathecally, intracerebrally, intraventricularly, intranasally, intratracheally, intra-aurally, intra-ocularly, or peri-ocularly, orally, rectally, transmucosally, inhalationally, transdermally, parenterally, subcutaneously, intradermally, intramuscularly, intracisternally, intranervally, intrapleurally, topically, intralymphatically, intracisternally or intranerve.

### BRIEF DESCRIPTION OF THE DRAWINGS

[0034] FIG. 1 is a schematic listing modified muscle-targeted AAV7 and AAVRh74 chimeric capsid proteins.

[0035] FIG. 2 is a schematic depicting muscle-targeted AAV Rh8 variant capsids comprising liver de-targeting amino acid mutations.

[0036] FIG. 3 is a schematic depicting modified muscle-targeted AAV capsid proteins of the disclosure.

[0037] FIG. 4 is a schematic depicting modified muscle-targeted AAVRh74 capsid proteins of the disclosure.

[0038] FIG. 5 shows immunofluorescence images showing transduction efficiency of HEK293 cells with an AAV vector comprising a VP1-specifically displayed targeting peptide.

[0039] FIGS. 6A-6D are immunofluorescence images showing enhanced transduction efficiency of C2C12 cells with modified muscle-targeted AAV capsids.

[0040] FIGS. 7A-C shows results of ex vivo imaging of AAV9, LBV30, and LBV31. FIG. 7A is an ex vivo immunofluorescence image showing in vivo targeting of AAV9, LBV30, and LBV31 capsids in mice. FIGS. 7B and 7C are graphs quantifying the immunofluorescence in various tissues.

[0041] FIG. 8 is a series of schematics depicting RGD peptide insertion scaffolds and approaches.

[0042] FIG. 9 is a graph depicting transduction of AAV viral vectors of the disclosure in the indicated mouse tissue: liver, heart, lung, spleen, kidney, intestine, testis, tongue, quadricep (quad), gastroenemius (gc), tibialis anterior (ta), diaphragm, and brain. The y-axis displays luminescence of an encapsidated luciferase reporter vector.

### DETAILED DESCRIPTION

[0043] The disclosure provides gene therapy compositions comprising modified and chimeric AAV capsid proteins for delivery of packaged therapeutics to muscular tissue.

[0044] The term “adeno-associated virus” or “AAV” as used herein refers to a member of the class of viruses associated with this name and belonging to the genus Dependoparvovirus, family Parvoviridae. Adeno-associated virus is a single-stranded DNA virus that grows in cells in which certain functions are provided by a co-infecting helper virus. General information and reviews of AAV can be found in, for example, Carter, 1989, Handbook of Parvoviruses, Vol. 1, pp. 169-228, and Berns, 1990, Virology, pp. 1743-1764, Raven Press, (New York). It is fully expected that the same principles described in these reviews will be applicable to additional AAV serotypes characterized after the publication dates of the reviews because it is well known that the various serotypes are quite closely related, both structurally and functionally, even at the genetic level. (See, for example, Blacklowe, 1988, pp. 165-174 of Parvoviruses and Human Disease, J. R. Pattison, ed.; and Rose, Comprehensive Virology 3: 1-61 (1974)). For example, all AAV serotypes apparently exhibit very similar replication properties mediated by homologous rep genes; and all bear three related capsid proteins such as those expressed in AAV2. The degree of relatedness is further suggested by heteroduplex analysis which reveals extensive cross-hybridization between serotypes along the length of the genome; and the presence of analogous self-annealing segments at the termini that correspond to “inverted terminal repeat sequences” (ITRs). The similar infectivity patterns also suggest that the replication functions in each serotype are under similar regulatory control. Multiple serotypes of this virus are known to be suitable for gene delivery; all known serotypes can infect cells from various tissue types. At least 11 sequentially numbered AAV serotypes are known in the art. Non-limiting exemplary serotypes useful in the methods disclosed herein include any of the 11 serotypes, e.g., AAV2, AAV8, AAV9, or variant serotypes, e.g., AAV-DJ and AAV PHP.B. The AAV particle comprises, consists essentially of, or consists of three major viral proteins: VP1, VP2 and VP3. In some aspects, the AAV refers to the serotype AAV1, AAV2, AAV4, AAV5, AAV6, AAV7, AAV8, AAV9, AAV10, AAV11, AAV12, AAV13, AAVPO1, AAVPHP.B, AAVrh74 or AAVrh.10.

[0045] Exemplary adeno-associated viruses and recombinant adeno-associated viruses include, but are not limited to all serotypes (e.g., AAV1, AAV2, AAV3, AAV4, AAV5, AAV6, AAV7, AAV8, AAV9, AAV10, AAV 11, AAV12, AAV13, AAVPO1, AAVPHP.B, AAVrh74 and AAVrh.10). Exemplary adeno-associated viruses and recombinant adeno-associated viruses include, but are not limited to, self-complementary AAV (scAAV) and AAV hybrids containing the genome of one serotype and the capsid of another serotype (e.g., AAV2/5, AAV-DJ and AAV-DJ8). Exemplary adeno-associated viruses and recombinant adeno-associated viruses include, but are not limited to, rAAV-LK03, AAV-KP-1 (described in detail in Kerun et al. JCI Insight, 2019; 4(22):e131610) and AAV-NP59 (described in detail in Paulk et al. Molecular Therapy, 2018; 26(1): 289-303).

### AAV Structure and Function

[0046] AAV is a replication-deficient parvovirus, the single-stranded DNA genome of which is about 4.7 kb in length, including two 145-nucleotide inverted terminal repeat (ITRs). There are multiple serotypes of AAV. The nucleotide sequences of the genomes of the AAV serotypes are known. For example, the complete genome of AAV-1 is provided in GenBank Accession No. NC_002077; the complete genome of AAV-2 is provided in GenBank Accession No. NC_001401 and Srivastava et al., J. Virol., 45: 555-564 (1983); the complete genome of AAV-3 is provided in GenBank Accession No. NC_1829; the complete genome of AAV-4 is provided in GenBank Accession No. NC_001829; the AAV-5 genome is provided in GenBank Accession No. AF085716; the complete genome of AAV-6 is provided in GenBank Accession No. NC_001862; at least portions of AAV-7 and AAV-8 genomes are provided in GenBank Accession Nos. AX753246 and AX753249, respectively; the AAV-9 genome is provided in Gao et al., J. Virol., 78: 6381-6388 (2004); the AAV-10 genome is provided in Mol. Ther., 13(1): 67-76 (2006); and the AAV-11 genome is provided in Virology, 330(2): 375-383 (2004). The sequence of the AAV rh.74 genome is provided in U.S. Pat. No. 9,434,928. U.S. Pat. No. 9,434,928 also provides the sequences of the capsid proteins and a self-complementary genome. In one aspect, an AAV genome is a self-complementary genome. Cis-acting sequences directing viral DNA replication (rep), encapsidation/packaging, and host cell chromosome integration are contained within AAV ITRs. Three AAV promoters (named p5, p19, and p40 for their relative map locations) drive the expression of the two AAV internal open reading frames encoding rep and cap genes. The two rep promoters (p5 and p19), coupled with the differential splicing of the single AAV intron (at nucleotides 2107 and 2227), result in the production of four rep proteins (rep 78, rep 68, rep 52, and rep 40) from the rep gene. Rep proteins possess multiple enzymatic properties that are ultimately responsible for replicating the viral genome.

[0047] The cap gene is expressed from the p40 promoter and encodes the three capsid proteins, VP1, VP2, and VP3. Alternative splicing and non-consensus translational start sites are responsible for the production of the three related capsid proteins. More specifically, after the single mRNA from which each of the VP1, VP2 and VP3 proteins are translated is transcribed, it can be spliced in two different manners: either a longer or shorter intron can be excised, resulting in the formation of two pools of mRNAs: a 2.3 kb- and a 2.6 kb-long mRNA pool. The longer intron is often preferred and thus the 2.3-kb-long mRNA can be called the major splice variant. This form lacks the first AUG codon, from which the synthesis of VP1 protein starts, resulting in a reduced overall level of VP1 protein synthesis. The first AUG codon that remains in the major splice variant is the initiation codon for the VP3 protein. However, upstream of that codon in the same open reading frame lies an ACG sequence (encoding threonine) which is surrounded by an optimal Kozak (translation initiation) context. This contributes to a low level of synthesis of the VP2 protein, which is actually the VP3 protein with additional N terminal residues, as is VP1, as described in Becerra S P et al., (December 1985). “Direct mapping of adeno-associated virus capsid proteins B and C: a possible ACG initiation codon”. Proceedings of the National Academy of Sciences of the United States of America. 82 (23): 7919-23, Cassinotti P et al., (November 1988). “Organization of the adeno-associated virus (AAV) capsid gene: mapping of a minor spliced mRNA coding for virus capsid protein 1”. Virology. 167 (1): 176-84, Muralidhar S et al., (January 1994). “Site-directed mutagenesis of adeno-associated virus type 2 structural protein initiation codons: effects on regulation of synthesis and biological activity”. Journal of Virology. 68 (1): 170-6, and Trempe J P, Carter B J (September 1988). “Alternate mRNA splicing is required for synthesis of adeno-associated virus VP1 capsid protein”. Journal of Virology. 62 (9): 3356-63, each of which is herein incorporated by reference. A single consensus polyA site is located at map position 95 of the AAV genome. The life cycle and genetics of AAV are reviewed in Muzyczka, Current Topics in Microbiology and Immunology, 158: 97-129 (1992).

[0048] Each VP1 protein contains a VP1 portion, a VP2 portion and a VP3 portion. The VP1 portion is the N-terminal portion of the VP1 protein that is unique to the VP1 protein. The VP2 portion is the amino acid sequence present within the VP1 protein that is also found in the N-terminal portion of the VP2 protein. The VP3 portion and the VP3 protein have the same sequence. The VP3 portion is the C-terminal portion of the VP1 protein that is shared with the VP1 and VP2 proteins.

[0049] The VP3 protein can be further divided into discrete variable surface regions I-IX (VRI-IX also referred to as VR1-VR8). Each of the variable surface regions (VRs) can comprise or contain specific amino acid sequences that either alone or in combination with the specific amino acid sequences of each of the other VRs can confer unique infection phenotypes (e.g., decreased antigenicity, improved transduction and/or tissue-specific tropism relative to other AAV serotypes) to a particular serotype as described in DiMatta et al., “Structural Insight into the Unique Properties of Adeno-Associated Virus Serotype 9” J. Virol., Vol. 86 (12): 6947-6958, June 2012, the contents of which are incorporated herein by reference.

[0050] AAV possesses unique features that make it attractive as a vector for delivering foreign DNA to cells, for example, in gene therapy. AAV infection of cells in culture is noncytopathic, and natural infection of humans and other animals is silent and asymptomatic. Moreover, AAV infects many mammalian cells allowing the possibility of targeting many different tissues in vivo. Moreover, AAV transduces slowly dividing and non-dividing cells, and can persist essentially for the lifetime of those cells as a transcriptionally active nuclear episome (extrachromosomal element). The AAV proviral genome is inserted as cloned DNA in plasmids, which makes construction of recombinant genomes feasible. Furthermore, because the signals directing AAV replication and genome encapsidation are contained within the ITRs of the AAV genome, some or all of the internal approximately 4.3 kb of the genome (encoding replication and structural capsid proteins, rep-cap) may be replaced with foreign DNA to generate AAV vectors. The rep and cap proteins may be provided in trans. Another significant feature of AAV is that it is an extremely stable and hearty virus. It easily withstands the conditions used to inactivate adenovirus (560 to 65° C. for several hours), making cold preservation of AAV less critical. AAV may even be lyophilized. Finally, AAV-infected cells are not resistant to superinfection.

[0051] Multiple studies have demonstrated long-term (>1.5 years) recombinant AAV-mediated protein expression in muscle. See, Clark et al., Hum Gene Ther, 8: 659-669 (1997); Kessler et al., Proc Nat. Acad Sc. USA, 93: 14082-14087 (1996); and Xiao et al., J Virol, 70: 8098-8108 (1996). See also, Chao et al., Mol Ther, 2:619-623 (2000) and Chao et al., Mol Ther, 4:217-222 (2001). Moreover, because muscle is highly vascularized, recombinant AAV transduction has resulted in the appearance of transgene products in the systemic circulation following intramuscular injection as described in Herzog et al., Proc Natl Acad Sci USA, 94: 5804-5809 (1997) and Murphy et al., Proc Natl Acad Sci USA, 94: 13921-13926 (1997). Moreover, Lewis et al., J Virol, 76: 8769-8775 (2002) demonstrated that skeletal myofibers possess the necessary cellular factors for correct antibody glycosylation, folding, and secretion, indicating that muscle is capable of stable expression of secreted protein therapeutics. Recombinant AAV (rAAV) genomes of the invention comprise, consist essentially of, or consist of a nucleic acid molecule encoding a therapeutic protein and one or more AAV ITRs flanking the nucleic acid molecule. Production of pseudotyped rAAV is disclosed in, for example, WO2001083692. Other types of rAAV variants, for example rAAV with capsid mutations, are also contemplated. See, e.g., Marsic et al., Molecular Therapy, 22(11): 1900-1909 (2014). The nucleotide sequences of the genomes of various AAV serotypes are known in the art.

### Recombinant AAV Vectors

[0052] An “rAAV vector” as used herein refers to a vector comprising, consisting essentially of, or consisting of one or more transgene sequences and one or more AAV inverted terminal repeat sequences (ITRs). Such AAV vectors can be replicated and packaged into infectious viral particles, comprising modified AAV capsid proteins of the disclosure, when present in a host cell that provides the functionality of rep and cap gene products; for example, by transfection of the host cell. In some aspects, AAV vectors contain a promoter, at least one nucleic acid that may encode at least one protein or RNA, and/or an enhancer and/or a terminator within the flanking ITRs that is packaged into the infectious AAV particle. The encapsidated nucleic acid portion may be referred to as the AAV vector genome. Plasmids containing rAAV vectors may also contain elements for manufacturing purposes, e.g., antibiotic resistance genes, origin of replication sequences etc., but these are not encapsidated and thus do not form part of the AAV particle.

[0053] In some aspects, an rAAV vector can comprise at least one transgene nucleic acid molecule. In some aspects, an rAAV vector can comprise at least one AAV inverted terminal (ITR) sequence. In some aspects, an rAAV vector can comprise at least one promoter sequence. In some aspects, an rAAV vector can comprise at least one enhancer sequence. In some aspects, an rAAV vector can comprise at least one polyA sequence. In some aspects, an rAAV vector can comprise at least one reporter protein.

[0054] In some aspects, an rAAV vector can comprise a first AAV ITR sequence, a promoter sequence, a transgene nucleic acid molecule, a polyA sequence, and a second AAV ITR sequence. In some aspects, an rAAV vector can comprise, in the 5′ to 3′ direction, a first AAV ITR sequence, a promoter sequence, a transgene nucleic acid molecule, a polyA sequence, and a second AAV ITR sequence.

[0055] In some aspects, an rAAV vector can comprise more than one transgene nucleic acid molecule. In some aspects, an rAAV vector can comprise at least two transgene nucleic acid molecules, such that the rAAV vector comprises a first transgene nucleic acid molecule and an at least second transgene nucleic acid molecule. In some aspects, the first and the at least second transgene nucleic acid molecule can comprise the same nucleic acid sequence. In some aspects, the first and the at least second transgene nucleic acid molecules can comprise different nucleic acid sequences. In some aspects, the first and the at least second transgene nucleic acid sequences can be adjacent to each other.

[0056] In some aspects, an rAAV vector can comprise more than one promoter sequence. In some aspects, an rAAV vector can comprise at least two promoter sequences, such that the rAAV vector comprises a first promoter sequence and an at least second promoter sequence. In some aspects, the first and the at least second promoter sequences can comprise the same sequence. In some aspects, the first and the at least second promoter sequences can comprise different sequences. In some aspects, the first and the at least second promoter sequences can be adjacent to each other. In some aspects wherein an rAAV vector also comprises a first transgene nucleic acid molecule and an at least second transgene nucleic acid molecule, the first promoter can be located upstream (5′) of the first transgene nucleic acid molecule and the at least second promoter can be located between the first transgene nucleic acid molecule and the at least second transgene nucleic acid molecule, such that the at least second promoter is downstream (3′) of the first transgene nucleic acid molecule and upstream (5′) of the at least second transgene nucleic acid molecule.

[0057] Any of the preceding rAAV vectors can further comprise at least one enhancer. The at least one enhancer can be located anywhere in the rAAV vector. In some aspects, the at least one enhancer can be located immediately upstream (5′) of a promoter. Thus, an rAAV vector can comprise, in the 5′ to 3′ direction, a first AAV ITR sequence, an enhancer, a promoter sequence, a transgene nucleic acid molecule, a polyA sequence, and a second AAV ITR sequence. In some aspects, the at least one enhancer can be located immediately downstream (3′) of a promoter. Thus, an rAAV vector can comprise, in the 5′ to 3′ direction, a first AAV ITR sequence, a promoter sequence, an enhancer, a transgene nucleic acid molecule, a polyA sequence, and a second AAV ITR sequence. In some aspects, the at least one enhancer can be located immediately downstream of a transgene nucleic acid molecule. Thus, an rAAV vector can comprise, in the 5′ to 3′ direction, a first AAV ITR sequence, a promoter sequence, a transgene nucleic acid molecule, an enhancer, a polyA sequence, and a second AAV ITR sequence.

[0058] rAAV vectors of the disclosure can comprise any transgene nucleic acid molecule known in the art. In some aspects, the transgene nucleic acid is a therapeutic transgene. In some aspects, a transgene nucleic acid molecule is referred to interchangeable as a nucleotide sequence of interest (NOI). An NOI includes, without limitation, any nucleotide sequence or transgene capable of being delivered by a vector. NOIs can be synthetic, derived from naturally occurring DNA or RNA, codon optimized, recombinant RNA/DNA, cDNA, partial genomic DNA, and/or combinations thereof. The NOI can be a coding region or partial coding region, but need not be a coding region. An NOI can be RNA/DNA in a sense or anti-sense orientation. NOIs are also referred herein, without limitation, as transgenes, heterologous sequences, genes, therapeutic genes. An NOI may also encode a POI (protein of interest), a partial POI, a mutated version or variant of a POI. A POI may be analogous to or correspond to a wild-type protein. A POI may also be a fusion protein or nucleoprotein complex such as a CRISPR/Cas nucleoprotein complex. A POI may also be a PUF or PUMBY protein. In some aspects, POIs can be RNA targeting or RNA-binding proteins or nucleoprotein complexes.

### NOIs or Transgenes Comprising Non-Guided RNA-Binding Fusion Proteins

[0059] In some embodiments, the NOI is a nucleic acid encoding a target RNA-binding fusion protein which is not an RNA-guided target RNA-binding fusion protein and as such comprises at least one RNA-binding polypeptide which is capable of binding a target RNA without a corresponding gRNA sequence. Such non-guided RNA-binding polypeptides include, without limitation, at least one RNA-binding protein or RNA-binding portion thereof which is a PUF (Pumilio and FBF homology family) protein. This type RNA-binding polypeptide can be used instead of a gRNA-guided RNA binding protein such as CRISPR/Cas. The unique RNA recognition mode of PUF proteins (named for Drosophila Pumilio and C. elegans fem-3 binding factor) that are involved in mediating mRNA stability and translation are well known in the art. The PUF domain of human Pumilio1, also known in the art, binds tightly to cognate RNA sequences and its specificity can be modified. It contains eight PUF modules that recognize eight consecutive RNA bases with each module recognizing a single base. Since two amino acid side chains in each module recognize the Watson-Crick edge of the corresponding base and determine the specificity of that module, a PUF protein can be designed to specifically bind most 8 to 16-nt RNA. Wang et al., Nat Methods. 2009; 6(11): 825-830. See also WO2012/068627 which is incorporated by reference herein in its entirety.

[0060] The modular nature of the PUF-RNA interaction has been used to rationally engineer the binding specificity of PUF domains (Cheong, C. G. & Hall, T. M. (2006) PNAS 103: 13635-13639; Wang, X. et al (2002) Cell 110: 501-512). However, only the successful design of PUF proteins with modules that recognize adenine, guanine or uracil have been reported prior to the teachings of WO2012/06827 supra. While the wild-type PumHD does not bind cytosine (C), molecular engineering has shown that some of the Pum units can be mutated to bind C with good yield and specificity. See e.g., Dong, S. et al. Specific and modular binding code for cytosine recognition in Pumilio/FBF (PUF) RNA-binding domains, The Journal of biological chemistry 286, 26732-26742 (2011). Accordingly, PumHD is a modified version of the WT Pumilio protein that exhibits programmable binding to arbitrary 8-base sequences of RNA. Each of the eight units of PumHD can bind to all four RNA bases, and the RNA bases flanking the target sequence do not affect binding. See also the following for art-recognized RNA-binding rules of PUF design: Filipovska A, Razif M F, Nygird K K, & Rackham O. A universal code for RNA recognition by PUF proteins. Nature chemical biology, 7(7), 425-427 (2011); Filipovska A, & Rackham O. Modular recognition of nucleic acids by PUF, TALE and PPR proteins. Molecular BioSystems, 8(3), 699-708 (2012); Abil Z, Denard C A, & Zhao H. Modular assembly of designer PUF proteins for specific post-transcriptional regulation of endogenous RNA. Journal of biological engineering, 8(1), 7 (2014); Zhao Y, Mao M, Zhang W, Wang J, Li H, Yang Y, Wang Z, & Wu J. Expanding RNA binding specificity and affinity of engineered PUF domains. Nucleic Acids Research, 46(9), 4771-4782 (2018); Shinoda K, Tsuji S, Futaki S, & Imanishi M. Nested PUF Proteins Extending Target RNA Elements for Gene Regulation. ChemBioChem, 19(2), 171-176 (2018); Koh Y Y, Wang Y, Qiu C, Opperman L, Gross L, Tanaka Hall T M, & Wickens M. Stacking Interactions in PUF-RNA Complexes. RNA, 17(4), 718-727 (2011).

[0061] As such, it is well known in the art that human PUM1 (1186 amino acids) contains an RNA-binding domain (RBD) in the C-terminus of the protein (also known as Pumilio homology domain PUM-HD amino acid 828-amino acid 1175) and that PUFs are based on the RBD of human PUM1. There are 8 structural repeat modules of 36 amino acids (except module 7 which has 43 amino acids) for RNA binding and flanking N- and C-terminal regions important for protein structure and stability. Within each repeat module, amino acids 12, 13, and 16 are important for RNA binding with 12 and 16 responsible for RNA base recognition. Amino acid 13 stacks with RNA bases and can be modified to tune specificity and affinity. Alternatively, the PUF design may maintain amino acid 13 as human PUM1's native residue. In some embodiments of the PUF or PUMBY compositions disclosed herein, amino acid 13 (for stacking) will be engineered with an H and in other embodiments, will be engineered with a Y. In some embodiments, stacking residues may be modified to improve binding and specificity. Recognition occurs in reverse orientation as N- to C-terminal PUF recognizes 3′ to 5′ RNA. Accordingly, PUF engineering of 8 modules (8PUF), as known in the art, mimics a human protein. An exemplary 8-mer RNA recognition (8PUF) would be designed as follows: R1′-R1-R2-R3-R4-R5-R6-R7-R8-R8′. In one embodiment, an 8PUF is used as the RBD. In another embodiment, a variation of the 8PUF design is used to create a 14-mer RNA recognition (14PUF) RBD, 15-mer RNA recognition (15PUF) RBD, or a 16-mer RNA recognition (16PUF) RBD. In another embodiment, the PUF can be engineered to comprise a 4-mer, 5-mer, 6-mer, 7-mer, 8-mer, 9-mer, 10-mer, 11-mer, 12-mer, 13-mer, 14-mer, 15-mer, 16-mer, 24-mer, 30-mer, 36-mer, or any number of modules between. Shinoda et al., 2018; Criscuolo et al., 2020 See also U.S. Pat. No. 9,580,714 which is incorporated herein in its entirety.

[0062] In some embodiments of the non-guided RNA-binding fusion proteins of the disclosure, the fusion protein comprises at least one RNA-binding protein or RNA-binding portion thereof which is a PUMBY (Pumilio-based assembly) protein. RNA-binding protein PumHD, which has been widely used in native and modified form for targeting RNA, has been engineered into a protein architecture designed to yield a set of four canonical protein modules, each of which targets one RNA base. These modules (i.e., Pumby, for Pumilio-based assembly) are concatenated in chains of varying composition and length, to bind desired target RNAs. In essence, PUMBY is a more simple and modular form of PumHD, in which a single protein unit of PumHD is concatenated into arrays of arbitrary size and binding sequence specificity. The specificity of such Pumby-RNA interactions is high, with undetectable binding of a Pumby chain to RNA sequences that bear three or more mismatches from the target sequence. Katarzyna et al., PNAS, 2016; 113(19): E2579-E2588. See also US 2016/0238593 which is incorporated by reference herein in its entirety.

[0063] In some embodiments of the compositions of the disclosure, the first RNA binding protein comprises a Pumilio and FBF (PUF) protein. In some embodiments, the first RNA binding protein comprises a Pumilio-based assembly (PUMBY) protein. In some embodiments, the PUF or PUMBY RNA-binding proteins are fused with a nuclease domain such as is an zinc-finger endonuclease known as ZC3H12A (E17).

[0064] In some embodiments of the compositions of the disclosure, at least one of the RNA-binding proteins or RNA-binding portions thereof is a PPR protein. PPR proteins (proteins with pentatricopeptide repeat (PPR) motifs derived from plants) are nuclear-encoded and exclusively controlled at the RNA level organelles (chloroplasts and mitochondria), cutting, translation, splicing, RNA editing, genes specifically acting on RNA stability. PPR proteins are typically a motif of 35 amino acids and have a structure in which a PPR motif is about 10 contiguous amino acids. The combination of PPR motifs can be used for sequence-selective binding to RNA. PPR proteins are often comprised of PPR motifs of about 10 repeat domains. PPR domains or RNA-binding domains may be configured to be catalytically inactive. WO 2013/058404 incorporated herein by reference in its entirety.

[0065] In some embodiments, the fusion protein disclosed herein comprises a linker between the at least two RNA-binding polypeptides. In some embodiments, the linker is a peptide linker. In some embodiments, the peptide linker comprises one or more repeats of the tri-peptide GGS. In other embodiments, the linker is a non-peptide linker. In some embodiments, the non-peptide linker comprises polyethylene glycol (PEG), polypropylene glycol (PPG), co-poly(ethylene/propylene) glycol, polyoxyethylene (POE), polyurethane, polyphosphazene, polysaccharides, dextran, polyvinyl alcohol, polyvinylpyrrolidones, polyvinyl ethyl ether, polyacryl amide, polyacrylate, polycyanoacrylates, lipid polymers, chitins, hyaluronic acid, heparin, or an alkyl linker.

[0066] In some embodiments, the at least one RNA-binding protein does not require multimerization for RNA-binding activity. In some embodiments, the at least one RNA-binding protein is not a monomer of a multimer complex. In some embodiments, a multimer protein complex does not comprise the RNA binding protein. In some embodiments, the at least one of RNA-binding protein selectively binds to a target sequence within the RNA molecule. In some embodiments, the at least one RNA-binding protein does not comprise an affinity for a second sequence within the RNA molecule. In some embodiments, the at least one RNA-binding protein does not comprise a high affinity for or selectively bind a second sequence within the RNA molecule. In some embodiments, the at least one RNA-binding protein comprises between 2 and 1300 amino acids, inclusive of the endpoints.

[0067] In some embodiments, the at least one RNA-binding protein of the fusion proteins disclosed herein further comprises a sequence encoding a nuclear localization signal (NLS). In some embodiments, a nuclear localization signal (NLS) is positioned at the N-terminus of the RNA binding protein. In some embodiments, the at least one RNA-binding protein comprises an NLS at a C-terminus of the protein. In some embodiments, the at least one RNA-binding protein further comprises a first sequence encoding a first NLS and a second sequence encoding a second NLS. In some embodiments, the first NLS or the second NLS is positioned at the N-terminus of the RNA-binding protein. In some embodiments, the at least one RNA-binding protein comprises the first NLS or the second NLS at a C-terminus of the protein. In some embodiments, the at least one RNA-binding protein further comprises an NES (nuclear export signal) or other peptide tag or secretory signal. In one embodiment, the tag is a FLAG tag.

[0068] In some embodiments, a fusion protein disclosed herein comprises the at least one RNA-binding protein as a first RNA-binding protein together with a second RNA-binding protein comprising or consisting of a nuclease domain.

[0069] In some embodiments, the second RNA-binding polypeptide is operably configured to the first RNA-binding polypeptide at the C-terminus of the first RNA-binding polypeptide. In some embodiments, the second RNA-binding polypeptide is operably configured to the first RNA-binding polypeptide at the N-terminus of the first RNA-binding polypeptide. In one embodiment, an exemplary fusion protein is a PUF or PUMBY-based first RNA-binding protein fused to a second RNA-binding protein which is an zinc-finger endonuclease known as ZC3H12A.

### NOIs or Transgenes Comprising Guide RNAs for RNA-Guided RNA-Binding Proteins

[0070] In a Cas-based RNA-targeting gene therapy system, an NOI or transgene comprises a guide RNA.

[0071] The terms guide RNA (gRNA) and single guide RNA (sgRNA) are used interchangeably throughout the disclosure.

[0072] Guide RNAs (gRNAs) of the disclosure may comprise of a spacer sequence and a “direct repeat” (DR) sequence. In some embodiments, a guide RNA is a single guide RNA (sgRNA) comprising a contiguous spacer sequence and DR sequence. In some embodiments, the spacer sequence and the DR sequence are not contiguous. In some embodiments, the gRNA comprises a DR sequence. DR sequences refer to the repetitive sequences in the CRISPR locus (naturally-occurring in a bacterial genome or plasmid) that are interspersed with the spacer sequences. It is well known that one would be able to infer the DR sequence of a corresponding (or cognate) Cas protein if the sequence of the associated CRISPR locus is known. In some embodiments, a guide RNA comprises a direct repeat (DR) sequence and a spacer sequence. In some embodiments, a sequence encoding a guide RNA or single guide RNA of the disclosure comprises or consists of a spacer sequence and a DR sequence, that are separated by a linker sequence. In some embodiments, the linker sequence may comprise or consist of 1, 2, 3, 4, 5, 6, 7, 8, 9, 10, 15, 20, 25, 30, 35, 40, 45, 50 or any number of nucleotides (nt) in between. In some embodiments, the linker sequence may comprise at least 1, 2, 3, 4, 5, 6, 7, 8, 9, 10, 15, 20, 25, 30, 35, 40, 45, 50 or any number of nucleotides in between. In some embodiments, the DR sequence is a Cas13d DR sequence.

[0073] In one embodiment, the gRNA that hybridizes with the one or more target RNA molecules in a Cas 13d-mediated manner includes one or more direct repeat (DR) sequences, one or more spacer sequences, such as, e.g., one or more sequences comprising an array of DR-spacer-DR-spacer. In one embodiment, a plurality of gRNAs are generated from a single array, wherein each gRNA can be different, for example target different RNAs or target multiple regions of a single RNA, or combinations thereof. In some embodiments, an isolated gRNA includes one or more direct repeat sequences, such as an unprocessed (e.g., about 36 nt) or processed DR (e.g., about 30 nt). In some embodiments, a gRNA can further include one or more spacer sequences specific for (e.g., is complementary to) the target RNA. In certain such embodiments, multiple polIII promoters can be used to drive multiple gRNAs, spacers and/or DRs. In one embodiment, a guide array comprises a DR (about 36 nt)-spacer (about 30 nt)-DR (about 36 nt)-spacer (about 30 nt).

[0074] Guide RNAs (gRNAs) of the disclosure may comprise non-naturally occurring nucleotides. In some embodiments, a guide RNA of the disclosure or a sequence encoding the guide RNA comprises or consists of modified or synthetic RNA nucleotides. Exemplary modified RNA nucleotides include, but are not limited to, pseudouridine (Ψ), dihydrouridine (D), inosine (I), and 7-methylguanosine (m7G), hypoxanthine, xanthine, xanthosine, 7-methylguanine, 5, 6-Dihydrouracil, 5-methylcytosine, 5-methylcytidine, 5-hydropxymethylcytosine, isoguanine, and isocytosine.

[0075] Guide RNAs (gRNAs) of the disclosure may bind modified RNA within a target sequence. Within a target sequence, guide RNAs (gRNAs) of the disclosure may bind modified or mutated (e.g., pathogenic) RNA. Exemplary epigenetically or post-transcriptionally modified RNA include, but are not limited to, 2′-O-Methylation (2′-OMe) (2′-O-methylation occurs on the oxygen of the free 2′-OH of the ribose moiety), N6-methyladenosine (m6A), and 5-methylcytosine (m5C).

[0076] In some embodiments of the compositions of the disclosure, a guide RNA of the disclosure comprises at least one sequence encoding a non-coding C/D box small nucleolar RNA (snoRNA) sequence. In some embodiments, the snoRNA sequence comprises at least one sequence that is complementary to the target RNA, wherein the target sequence of the RNA molecule comprises at least one 2′-OMe. In some embodiments, the snoRNA sequence comprises at least one sequence that is complementary to the target RNA, wherein the at least one sequence that is complementary to the target RNA comprises a box C motif (RUGAUGA) and a box D motif (CUGA).

[0077] Spacer sequences of the disclosure bind to the target sequence of an RNA molecule. In some embodiments, spacer sequences of the disclosure bind to pathogenic target RNA.

[0078] In some embodiments of the compositions of the disclosure, the sequence comprising the gRNA further comprises a spacer sequence that specifically binds to the target RNA sequence. In some embodiments, the spacer sequence has at least 50%, 55%, 60%, 65%, 70%, 75%, 80%, 87%, 90%, 95%, 97%, 99% or any percentage in between of complementarity to the target RNA sequence. In some embodiments, the spacer sequence has 100% complementarity to the target RNA sequence. In some embodiments, the spacer sequence comprises or consists of 20 nucleotides. In some embodiments, the spacer sequence comprises or consists of 21 nucleotides, 22 nucleotides, 23 nucleotides, 24 nucleotides, 25 nucleotides, 26 nucleotides, 27 nucleotides, 28 nucleotides, or 29 nucleotides. In some embodiments, the spacer sequence comprises or consists of 26 nucleotides. In some embodiments, the spacer sequence is non-processed and comprises or consists of 30 nucleotides. In some embodiments the non-processed spacer sequence comprises or consists of 30-36 nucleotides.

[0079] DR sequences of the disclosure bind the Cas polypeptide of the disclosure. Upon binding of the spacer sequence of the gRNA to the target RNA sequence, the Cas protein bound to the DR sequence of the gRNA is positioned at the target RNA sequence. A DR sequence having sufficient complementarity to its cognate Cas protein, or nucleic acid thereof, binds selectively to the target nucleic acid sequence of the Cas protein and has at least 50%, 55%, 60%, 65%, 70%, 75%, 80%, 85%, 90%, 95%, 96, 97%, 98%, 99%, or any percentage identity in between to the sequence. In some embodiments, a sequence having sufficient complementarity has 100% identity. In some embodiments, DR sequences of the disclosure comprise a secondary structure or a tertiary structure. Exemplary secondary structures include, but are not limited to, a helix, a stem loop, a bulge, a tetraloop and a pseudoknot. Exemplary tertiary structures include, but are not limited to, an A-form of a helix, a B-form of a helix, and a Z-form of a helix. Exemplary tertiary structures include, but are not limited to, a twisted or helicized stem loop. Exemplary tertiary structures include, but are not limited to, a twisted or helicized pseudoknot. In some embodiments, DR sequences of the disclosure comprise at least one secondary structure or at least one tertiary structure. In some embodiments, DR sequences of the disclosure comprise one or more secondary structure(s) or one or more tertiary structure(s).

[0080] In some embodiments of the compositions of the disclosure, a guide RNA or a portion thereof selectively binds to a tetraloop motif in an RNA molecule of the disclosure. In some embodiments, a target sequence of an RNA molecule comprises a tetraloop motif. In some embodiments, the tetraloop motif is a “GRNA” motif comprising or consisting of one or more of the sequences of GAAA, GUGA, GCAA or GAGA.

[0081] In some embodiments of the compositions of the disclosure, a guide RNA or a portion thereof that binds to a target sequence of an RNA molecule hybridizes to the target sequence of the RNA molecule. In some embodiments, a guide RNA or a portion thereof that binds to a first RNA binding protein or to a second RNA binding protein covalently binds to the first RNA binding protein or to the second RNA binding protein. In some embodiments, a guide RNA or a portion thereof that binds to a first RNA binding protein or to a second RNA binding protein non-covalently binds to the first RNA binding protein or to the second RNA binding protein.

[0082] In some embodiments of the compositions of the disclosure, a guide RNA or a portion thereof comprises or consists of between 10 and 100 nucleotides, inclusive of the endpoints. In some embodiments, a spacer sequence of the disclosure comprises or consists of between 10 and 30 nucleotides, inclusive of the endpoints. In some embodiments, a spacer sequence of the disclosure comprises or consists of 15, 16, 17, 18, 19, 20, 21, 22, 23, 24, 25, 26, 27, 28, 29 or 30 nucleotides. In some embodiments, the spacer sequence of the disclosure comprises or consists of 20 nucleotides. In some embodiments, the spacer sequence of the disclosure comprises or consists of 21 nucleotides. In some embodiments, the spacer sequence of the disclosure comprises or consists of 26 nucleotides.

[0083] Guide molecules generally exist in various states of processing. In one example, an unprocessed guide RNA is 36 nt of DR followed by 30-32 nt of spacer. The guide RNA is processed (truncated/modified) by Cas 13d itself or other RNases into the shorter “mature” form. In some embodiments, an unprocessed guide sequence is about, or at least about 30, 35, 40, 45, 50, 55, 60, 61, 62, 63, 64, 65, 66, 67, 68, 69, 70, 71, 72, 73, 74, 75, or more nucleotides (nt) in length. In some embodiments, a processed guide sequence is about 44 to 60 nt (such as 40, 41, 42, 43, 44, 45, 46, 47, 48, 49, 50, 51, 52, 53, 54, 55, 56, 57, 58, 59, 60, 61, 62, 63, 64, 65, 66, 67, 68, 69, or 70 nt). In some embodiments, an unprocessed spacer is about 28-32 nt long (such as 25, 26, 27, 28, 29, 30, 31, 32, 33, 34, or 35 nt) while the mature (processed) spacer can be about 10 to 30 nt, 10 to 25 nt, 14 to 25 nt, 20 to 22 nt, or 14-30 nt (such as 10, 11, 12, 13, 14, 15, 16, 17, 18, 19, 20, 21, 22, 23, 24, 25, 26, 27, 28, 29, 30, 31, 32, 33, 34, or 35 nt). In some embodiments, an unprocessed DR is about 36 nt (such as 30, 31, 32, 33, 34, 35, 36, 37, 38, 39, 40 or 41 nt), while the processed DR is about 30 nt (such as 25, 26, 27, 28, 29, 30, 31, 32, 33, 34, or 35 nt). In some embodiments, a DR sequence is truncated by 1-10 nucleotides (such as 1, 2, 3, 4, 5, 6, 7, 8, 9, to 10 nucleotides at e.g., the 5′ end in order to be expressed as mature pre-processed guide RNAs.

[0084] In some embodiments of the compositions of the disclosure, a guide RNA or a portion thereof does not comprise a nuclear localization sequence (NLS).

[0085] In some embodiments of the compositions of the disclosure, a guide RNA or a portion thereof comprises a sequence complementary to a protospacer flanking sequence (PFS). In some embodiments, including those wherein a guide RNA or a portion thereof comprises a sequence complementary to a PFS, the first RNA binding protein may comprise a sequence isolated or derived from a Cas13 protein. In some embodiments, including those wherein a guide RNA or a portion thereof comprises a sequence complementary to a PFS, the first RNA binding protein may comprise a sequence encoding a Cas13 protein or an RNA-binding portion thereof. In some embodiments, the guide RNA or a portion thereof does not comprise a sequence complementary to a PFS.

[0086] In some embodiments of the compositions of the disclosure, guide RNA sequence of the disclosure comprises a promoter sequence to drive expression of the guide RNA. In some embodiments, a vector comprising a guide RNA sequence of the disclosure comprises a promoter sequence to drive expression of the guide RNA. In some embodiments, the promoter to drive expression of the guide RNA is a constitutive promoter. In some embodiments, the promoter sequence is an inducible promoter. In some embodiments, the promoter is a sequence is a tissue-specific and/or cell-type specific promoter. In some embodiments, the promoter is a hybrid or a recombinant promoter. In some embodiments, the promoter is a promoter capable of expressing the guide RNA in a mammalian cell. In some embodiments, the promoter is a promoter capable of expressing the guide RNA in a human cell. In some embodiments, the promoter is a promoter capable of expressing the guide RNA and restricting the guide RNA to the nucleus of the cell. In some embodiments, the promoter is a human RNA polymerase promoter or a sequence isolated or derived from a sequence encoding a human RNA polymerase promoter. In some embodiments, the promoter is a U6 promoter or a sequence isolated or derived from a sequence encoding a U6 promoter. In some embodiments, the U6 promoter is a human U6 promoter. In some embodiments, the promoter is a human tRNA promoter or a sequence isolated or derived from a sequence encoding a human tRNA promoter. In some embodiments, the promoter is a human valine tRNA promoter or a sequence isolated or derived from a sequence encoding a human valine tRNA promoter.

[0087] In some embodiments of the compositions of the disclosure, a promoter to drive expression of the guide RNA further comprises a regulatory element. In some embodiments, a vector comprising a promoter sequence to drive expression of the guide RNA further comprises a regulatory element. In some embodiments, a regulatory element enhances expression of the guide RNA. Exemplary regulatory elements include, but are not limited to, an enhancer element, an intron, an exon, or a combination thereof.

[0088] In some embodiments of the compositions of the disclosure, a vector of the disclosure comprises one or more of a sequence encoding a guide RNA, a promoter sequence to drive expression of the guide RNA and a sequence encoding a regulatory element. In some embodiments of the compositions of the disclosure, the vector further comprises a sequence encoding a fusion protein of the disclosure.

### RNA-Guided RNA-Binding Proteins

[0089] In some embodiments of the compositions of the disclosure, gRNAs correspond to target RNA molecules and an RNA-guided RNA binding protein. In some embodiments, the gRNAs correspond to an RNA-guided RNA binding fusion protein, wherein the fusion protein comprises first and second RNA binding proteins. In some embodiments, the first RNA-binding protein in the fusion protein is a deactivated RNA-binding protein, e.g., a deactivated Cas or catalytic dead Cas protein. In some embodiments, along a sequence encoding the RNA-binding fusion protein, the sequence encoding the first RNA binding protein is positioned 5′ of the sequence encoding the second RNA binding protein. In some embodiments, along a sequence encoding the fusion protein, the sequence encoding the first RNA binding protein is positioned 3′ of the sequence encoding the second RNA binding protein.

[0090] In some embodiments of the compositions of the disclosure, the sequence encoding the first RNA binding protein comprises a sequence isolated or derived from a protein capable of binding an RNA molecule. In some embodiments, the sequence encoding the first RNA binding protein comprises a sequence isolated or derived from a protein capable of selectively binding an RNA molecule and not binding a DNA molecule, a mammalian DNA molecule or any DNA molecule. In some embodiments, the sequence encoding the first RNA binding protein comprises a sequence isolated or derived from a protein capable of binding an RNA molecule and inducing a break in the RNA molecule. In some embodiments, the sequence encoding the first RNA binding protein comprises a sequence isolated or derived from a protein capable of binding an RNA molecule, inducing a break in the RNA molecule, and not binding a DNA molecule, a mammalian DNA molecule or any DNA molecule. In some embodiments, the sequence encoding the first RNA binding protein comprises a sequence isolated or derived from a protein capable of binding an RNA molecule, inducing a break in the RNA molecule, and neither binding nor inducing a break in a DNA molecule, a mammalian DNA molecule or any DNA molecule.

[0091] In some embodiments of the compositions of the disclosure, the sequence encoding the first RNA-guided RNA binding protein comprises a sequence isolated or derived from a protein with no DNA nuclease activity.

[0092] In some embodiments of the compositions of the disclosure, the sequence encoding the RNA-guided RNA binding protein disclosed herein comprises a sequence isolated or derived from a CRISPR Cas protein. In some embodiments, the CRISPR Cas protein is not a Type II CRISPR Cas protein. In some embodiments, the CRISPR Cas protein is not a Cas9 protein. In some embodiments, the Cas9 protein is engineered to target RNA (RCas9). In some embodiments of the compositions of the disclosure, the sequence encoding the RNA-guided RNA binding protein comprises a Type VI CRISPR Cas protein or portion thereof. In some embodiments, the Type VI CRISPR Cas protein comprises a Cas13 protein or portion thereof. Exemplary Cas13 proteins of the disclosure may be isolated or derived from any species, including, but not limited to, a bacteria or an archaea. Exemplary Cas13 proteins of the disclosure may be isolated or derived from any species, including, but not limited to, Leptotrichia wadei, Listeria seeligeri serovar 112b (strain ATCC 35967 DSM 20751 CIP 100100 SLCC 3954), Lachnospiraceae bacterium, Clostridium aminophilum DSM 10710, Carnobacterium gallinarum DSM 4847, Paludibacter propionicigenes WB4, Listeria weihenstephanensis FSL R9-0317, Listeria weihenstephanensis FSL R9-0317, bacterium FSL M6-0635 (Listeria newyorkensis), Leptotrichia wadei F0279, Rhodobacter capsulatus SB 1003, Rhodobacter capsulatus R121, Rhodobacter capsulatus DE442 and Corynebacterium ulcerans. Exemplary Cas13 proteins of the disclosure may be DNA nuclease inactivated. Exemplary Cas13 proteins of the disclosure include, but are not limited to, Cas13a, Cas13b, Cas13c, Cas13d and orthologs thereof. Exemplary Cas13b proteins of the disclosure include, but are not limited to, subtypes 1 and 2 referred to herein as Csx27 and Csx28, respectively.

### AAV Viral Vectors

[0093] A “viral vector” is defined as a recombinantly produced virus or viral particle that contains a polynucleotide to be delivered into a host cell, either in vivo, ex vivo or in vitro. Examples of viral vectors include retroviral vectors, AAV vectors, lentiviral vectors, adenovirus vectors, alphavirus vectors and the like. Alphavirus vectors, such as Semliki Forest virus-based vectors and Sindbis virus-based vectors, have also been developed for use in gene therapy and immunotherapy. See, e.g., Schlesinger and Dubensky (1999) Curr. Opin. Biotechnol. 5:434-439 and Ying, et al. (1999) Nat. Med. 5(7):823-827.

[0094] An “AAV virion” or “AAV viral particle” or “AAV viral vector” or “rAAV viral vector” or “AAV vector particle” or “AAV particle” refers to a viral particle composed of at least one AAV capsid protein and an encapsidated polynucleotide rAAV vector. Thus, production of an rAAV viral vector necessarily includes production of an rAAV vector, as such a vector is contained within an rAAV vector.

[0095] As used herein, the term “viral capsid” or “capsid” refers to the proteinaceous shell or coat of a viral particle. Capsids function to encapsidate, protect, transport, and release into the host cell a viral genome. Capsids are generally comprised of oligomeric structural subunits of protein (“capsid proteins”). As used herein, the term “encapsidated” means enclosed within a viral capsid. The viral capsid of AAV is composed of a mixture of three viral capsid proteins: VP1, VP2, and VP3. The mixture of VP1, VP2 and VP3 contains 60 monomers that are arranged in a T=1 icosahedral symmetry in a ratio of 1:1:10 (VP1:VP2:VP3) or 1:1:20 (VP1:VP2:VP3) as described in Sonntag F et al., (June 2010). “A viral assembly factor promotes AAV2 capsid formation in the nucleolus”. Proceedings of the National Academy of Sciences of the United States of America. 107 (22): 10220-5, and Rabinowitz J E, Samulski R J (December 2000). “Building a better vector: the manipulation of AAV virions”. Virology. 278 (2): 301-8, each of which is incorporated herein by reference in its entirety.

[0096] The present disclosure provides an rAAV viral vector comprising: a) any of the rAAV vectors described herein; and b) an AAV capsid protein.

[0097] An AAV capsid protein can be any AAV capsid protein known in the art. In some aspects, the AAV capsid protein is a modified AAV capsid protein. An AAV capsid protein can be an AAV1 capsid protein, an AAV2 capsid protein, an AAV4 capsid protein, an AAV5 capsid protein, an AAV6 capsid protein, an AAV7 capsid protein, an AAV8 capsid protein, an AAV9 capsid protein, an AAV10 capsid protein, an AAV11 capsid protein, an AAV12 capsid protein, an AAV13 capsid protein, an AAVPHP.B capsid protein, an AAVrh74 capsid protein or an AAVrh.10 capsid protein. An AAV capsid protein can be any modified AAV capsid protein of the disclosure.

### Modified AAV Capsid Proteins

[0098] As used herein, the term “viral capsid” or “capsid” refers to the proteinaceous shell or coat of a viral particle. Capsids function to encapsidate, protect, transport, and release into the host cell a viral genome. Capsids are generally comprised of oligomeric structural subunits of protein (“capsid proteins”). As used herein, the term “encapsidated” means enclosed within a viral capsid. Provided herein are modified AAV capsid proteins which may be used to construct modified and/or chimeric AAV vectors or AAV capsids.

[0099] An AAV capsid generally consists of a total of 60 molecules of viral proteins (VPs), VP1, VP2, and VP3 at a ratio of about 1:1:10. VP1, VP2, and VP3 are encoded by the cap open reading frame and are generated through alternative splicing of the mRNA and use of an alternate translational start codon. The VP3 sequence of about 524-544 amino acids (aa) is shared among all VPs, the VP2 sequence is approximately 57aa longer than VP3 (about 580-601aa) and the VP1 sequence is approximately 137 aa longer than VP2 (about 713-738aa). The VP3 common region assembles the icosahedral capsid. See Wörner et al. Nature Communications Vol. 12, Article number: 1642 (2021).

[0100] In some aspects, modified AAV capsid proteins of the disclosure are derived from any AAV serotype known in the art. An AAV capsid protein can be derived from any AAV capsid protein known in the art. In some aspects, an AAV capsid protein can be derived from an AAV1 capsid protein, an AAV2 capsid protein, an AAV4 capsid protein, an AAV5 capsid protein, an AAV6 capsid protein, an AAV7 capsid protein, an AAV8 capsid protein, an AAV9 capsid protein, an AAV10 capsid protein, an AAV11 capsid protein, an AAV12 capsid protein, an AAV13 capsid protein, an AAVPHP.B capsid protein, an AAVrh8 capsid protein, an AAVrh74 capsid protein or, AAV-TT (AAVv66) capsid protein, an AAV PO1 capsid protein, an AAVDJ, or an AAVrh10 capsid protein. In some aspects, the AAV capsid protein is an AAV-TT capsid protein. In some aspects, the AAV capsid protein is an AAVrh10 capsid protein. In some aspects, modified AAV capsid proteins of the disclosure can be chimeric AAV capsid proteins derived from two or more AAV capsid proteins.

[0101] Disclosed herein are modified AAV capsid protein sequences. As used herein a “modified AAV capsid protein” or a “modified capsid protein” refers to AAV capsid proteins that have been modified with respect to the wild-type AAV capsid protein sequence. Modified AAV capsid proteins can comprise any one of capsid proteins VP1, VP2, or VP3. Modifications to AAV capsid protein sequences can be any protein modification known in the art including amino acid deletions, mutations, insertions, or re-arrangements. Modifications to AAV capsid proteins can be the formation of chimeric AAV capsid proteins wherein regions of two or more AAV capsid proteins are spliced or combined together to form a hybrid or chimeric AAV capsid protein. In some aspects, a modified AAV capsid protein comprised of a hybrid or chimeric AAV capsid protein comprises regions of two or more AAV capsid proteins each having a unique serotype. In some aspects, a hybrid capsid protein is one where variable domain loop regions of the capsid protein has been swapped. In some aspects, a hybrid AAV capsid protein comprises variable region loops from two or more capsid sequences having different serotypes.

[0102] Modified AAV capsid proteins of the disclosure can comprise insertions of peptides from any protein or peptide known in the art. In some aspects, the inserted peptide can be derived from a non-AAV capsid protein.

[0103] Modified AAV capsid proteins of the disclosure can comprise any combination of modifications. By way of non-limiting example, AAV capsid proteins of the disclosure can be both chimeric and contain at least one of an amino acid deletion, mutation, insertion, or re-arrangement.

[0104] Modified AAV capsid proteins of the disclosure can used to form AAV capsids with improved properties including increased transduction in a specific tissue type (i.e. “on-target transduction” and/or reduced transduction in undesired tissue types (i.e. “off-target transduction”). In some aspects, muscle tissue-specific transduction is observed. In some aspects, ocular tissue specific transduction is observed. In some aspects, neuron or neuronal tissue specific transduction is observed. In some aspects, transduction in the liver is reduced or eliminated. In some aspects, AAV capsids comprising modified AAV capsid proteins have reduced transduction in non-targeted tissues or cell types. In some aspects, non-targeted tissues include liver, lung, kidney, brain, spleen, intestine, spinal cord, or reproductive organs.

[0105] Without wishing to be bound by theory, AAV vectors comprising modified AAV capsid proteins of the disclosure can have reduced reactivity to pre-existing neutralizing antibodies in a human subject due to the modifications to the capsid producing distinct binding epitopes not observed in commonly used AAV capsid serotypes.

### Peptide Insertions in AAV Capsid Proteins

[0106] Peptides or amino acids can be inserted in any region of an AAV capsid protein. Insertions can occur at the N-terminus or C-terminus of the protein. In some aspects, insertions can occur in any variable region (VR) of the capsid protein including VR1 (VRI), VR2 (VRII), VR3 (VRIII), VR4 (VRIV), VR5 (VRV), VR6 (VRVI, VR7 (VRVII), VR8 (VRVIII), or VR9 (VRX).

[0107] In some aspects, modified AAV capsid proteins of the disclosure comprise modified variable regions. In some aspects, modified AAV capsid proteins of the disclosure comprise modified VR VIII regions. In some aspects, the modification to the AAV capsid protein is an insertion into VR VIII.

### Peptide Insertion Sequences

[0108] Peptides sequences were chosen to enhance transduction in a tissue-specific manner. Any sequence that enhances tissue-specific transduction is contemplated. In some aspects, muscle tissue-specific transduction is observed. In some aspects, ocular tissue specific transduction is observed. In some aspects, neuron or neuronal tissue specific transduction is observed. Inserted peptides can target tissue-specific receptors leading to increased transduction in said tissues.

[0109] In some aspects, modified AAV capsid proteins comprise a peptide insertion targeting insulin receptor (INSR). AAV vectors designed to target INSR have been shown to enhance intramuscular transduction (See Jackson et al. Molecular Therapy Methods & Clinical Development, 2020, 19, 11, 496-506 which is incorporated herein by reference in its entirety). In some aspects, the inserted INSR-targeting peptide is an insulin-mimetic peptide referred to as S519. In some aspects, the S519 peptide can comprise, consist essentially of, or consist of an amino acid sequence at least 65%, 70%, 75%, 80%, 85%, 90%, 95%, 96%, 97%, 98%, 99% or 100% (or any percentage in between) identical to the amino acid sequence SLEEEWAQVECEVYGRGCPSGSLDESFYDWFERQL (SEQ ID NO: 301).

[0110] In some aspects, modified AAV capsid proteins comprise a peptide insertion targeting muscle-specific kinase (MUSK). MUSK expression in the liver has been shown to be either extremely low or absent. Acetylcholinesterase collagenic tail peptide (ColQ) is known to bind and target MUSK. In some aspects, the inserted MUSK-targeting peptide is a C-terminal portion of ColQ (ColQ CTD). In some aspects, the ColQ CTD peptide can comprise, consist essentially of, or consist of an amino acid sequence at least 65%, 70%, 75%, 80%, 85%, 90%, 95%, 96%, 97%, 98%, 99% or 100% (or any percentage in between) identical to the amino acid sequence TPFYPVGYTVKQPGTCGDGVLQPGEECDDGNPDVSDGCIDCHRAYCGDGYRHQGV EDCDGSDFGYLTCETYLPGSYGDLRCTQYCSIDSTPCRYFT (SEQ ID NO: 302).

[0111] In some aspects, modified AAV capsid proteins comprise a peptide insertion targeting integrin. In some aspects, the integrin-targeting peptide comprises an RGD-motif. RGD sequences are known in the art, and include, for example, the motif RGDXXXX which may be inserted in an AAV viral vector for targeting via the integrin class of receptors. see, e.g., Michelfelder et al., PLoS One. 2009; 4(4): e5122 which is incorporated herein by reference in its entirety for example of RGD sequences that may be used in modified AAV capsids described herein. RGD-motif peptide insertions into VR8 of AAV9 has been shown to increase mouse muscle transduction (See Weinmann et al. Nature Communications, 11:5432 which is incorporated herein by reference in its entirety). In some aspects, the RGD peptide comprises a subsequence Y or F amino acid to produce an RGDY or RGDF motif. RGDY or RGDF motifs have been demonstrated to produce enhanced muscle transduction in non-human primates (NHP) (See Tabebordbar et al. Cell, 184, 19, 2021, 4919-4938 which is incorporated herein by reference in its entirety). In some aspects, the RGD sequence comprises RGDLGLS (SEQ ID NO: 303). In some aspects, the RGD sequence comprises RGDLSTP (SEQ ID NO: 304), SNSRGDYNSL (SEQ ID NO: 305), ENRRGDFNNT (SEQ ID NO: 306), SRGDYNSL (SEQ ID NO: 307), RGDYNSL (SEQ ID NO: 308), RGDLST (SEQ ID NO: 309), or RGDYVGL (SEQ ID NO: 310).

[0112] In some aspects, RGD sequences of the disclosure can be inserted in a scaffold (FIG. 8). In some aspects, RGD sequences of the disclosure comprise a linker on one or more of the N-terminus and C-terminus forming a linker scaffold. In some aspects, the linker scaffold comprises a flexible linker such as GGGS (SEQ ID NO: 311). In some aspects, the linker scaffold comprises a rigid scaffold such as a VHH, GP2, cyclic peptide, or knottin scaffold.

[0113] In some aspects, the RGD sequence comprises a variable domain of camelid heavy-chain-only antibody (VHH) RGD peptide, for example a VHH RGD peptide comprising, consisting essentially of, or consisting of an amino acid sequence at least 65%, 70%, 75%, 80%, 85%, 90%, 95%, 96%, 97%, 98%, 99% or 100% (or any percentage in between) identical to the amino acid sequence EVQLQASGGGFVQAGGSLRLSCAVSGRGDLSTPSYGMHWVRQAPGKEREFVAGISR GDYNSLYYADSVQGRFTISRDNAKNTVYLQMNSLKPEDTATYYCAENRRGDFNNT YWGQGTQVTVSS (SEQ ID NO:316) (RGD motif underlined).

[0114] In some aspects, RGD peptide insertions comprise a glycoprotein 2 (GP2) peptide scaffolded insertion. In some aspects, GP2 scaffolded peptide insertions comprise the amino acid sequence KFWATVGRGDLSTPFEVPVYAETLDEALELAENRRGDFNNTVTRVRP (SEQ ID NO:317) or GGGGSGGGGSKFWATVGRGDLSTPFEVPVYAETLDEALELAENRRGDFNNTVTRVRPGGGG S (SEQ ID NO: 318).

[0115] In some aspects, RGD peptide insertions can comprise a knottin scaffolded peptide insertion. In some aspects, knottin scaffolded peptide insertions comprise the amino acid sequence NSRGDYNSLSCSQDSDCLAGCVCGPNGFC (SEQ ID NO: 319) or GGGGSGGGGSGCSNSRGDYNSLSCSQDSDCLAGCVCGPNGFCGGGGGS (SEQ ID NO: 320).

[0116] In some aspects, RGD peptide insertions can comprise a cyclic peptide scaffolded RGD peptide insertion. In some aspects, cyclic peptide scaffolded RGD peptide insertions comprise the amino acid sequence ACRGDYNSLCRGDLSTC (SEQ ID NO: 321) or GGGGACRGDYNSLCRGDLSTCGGGGS (SEQ ID NO: 322).

[0117] Scaffolds can be used to insert any peptide known in the art. Therefore, VHH, GP2, cyclic peptides, knottin, or flexible linkers can be used to scaffold or flank any peptide for insertion into a modified AAV capsid protein of the disclosure.

[0118] Inserted peptides can be flanked on the N-terminus or C-terminus by flexible linker peptides of any length. In some aspects, a flexible linker such as GGGS (SEQ ID NO: 311) is used. In some aspects, the flexible GGGS linker can be repeated multiple times to form a longer linker sequence. In some aspects, the linker is repeated one time, two times, three times, four times, five times, six times, seven times, eight times, nine times, or ten times. In some aspects, the linker sequence comprises GGGGS (SEQ ID NO: 311), GGGGSGGGGS (SEQ ID NO: 312); GGGGSGGGGSGGGGS(SEQ ID NO: 313); GGGGSGGGGSGGGGSGGGGS (SEQ ID NO: 314); or GGGGSGGGGSGGGGSGGGGSGGGGS (SEQ ID NO: 315).

### Point Mutations

[0119] Additionally or alternatively, modified AAV capsid proteins may comprise amino acid mutations yielding increased transduction in a desired tissue type. In some aspects, modified AAV capsid proteins may comprise amino acid mutations yielding reduced transduction in specific tissues types. In some aspects, modified AAV capsid proteins comprise amino acid mutations that yield reduced liver tissue transduction.

[0120] In some embodiments, a modified AAV capsid protein comprises an amino acid sequence provided herein (e.g., a sequence selected from Table 1) with one, two, three, four, five, six, seven, eight, nine, ten, or more amino acid changes. The amino acid change can be the substitution of one amino acid for any other amino acid, including natural amino acids and un-natural or modified amino acids. In some aspects, the mutation is a conservative amino acid mutation. A conservative amino acid substitution is an amino acid replacement in a protein that changes a given amino acid to a different amino acid with similar biochemical properties (e.g., charge, hydrophobicity or size). Examples of conservative amino acid substitutions include the substitution of one hydrophobic residue such as isoleucine, valine, leucine or methionine for another; or the substitution of one charged or polar residue for another, such as the substitution of arginine for lysine, glutamic acid for aspartic acid, glutamine for asparagine, and the like. In some embodiments, a conservative amino acid substitution is selected from alanine to serine; asparagine to glutamine or histidine; aspartate to glutamate; cysteine to serine; glycine to proline; histidine to asparagine or glutamine; lysine to arginine, glutamine, or glutamate; phenylalanine to tyrosine, serine to threonine; threonine to serine; tryptophan to tyrosine; tyrosine to tryptophan or phenylalanine.

[0121] In some aspects, mutations at position 503 of AAVrh8 yield reduced liver transduction. In some aspects, substitution of tryptophan for alanine at position 503 of AAVrh8 yields reduced liver transduction. In some aspects, mutations at position 505 of AAVrh74 yields reduced liver transduction. In some aspects, substitution of tryptophan for alanine at position 55 of AAVrh74 yields reduced liver transduction. In some aspects, mutations at position 498 of an AAV9 capsid proteins yield reduced liver transduction. In some aspects, an AAV9 point mutation comprises an N498 mutation. In some aspects, an AAV9 point mutation comprises an N498I mutation. In some aspects, mutations at position 602 of an AAV capsid proteins yield reduced liver transduction.

[0122] Robust liver de-targeting in NHPs has been suggested by mutating the following residues in AAV9 (F501I, G505R, Y706C). In some aspects, liver de-targeting mutations of AAV9 include at least one of F501I, G505R, Y706C. Equivalent mutations in certain vectors of the disclosure include F503I, G507R, and Y708C in LBV30 to generate LBV92. In some aspects, AAV Rh74 liver de-targeting mutations comprise mutations to any combination of residues F503, G507, Y707, and/or Y708 of AAV Rh74. On some aspects, these mutations comprise F503I, G507R, Y707C, and/or Y708C of AAV Rh74.

[0123] In some aspects, point mutations of the disclosure are numbered in reference to the wild-type AAV capsid protein sequence. Wild type AAV capsid proteins sequences are disclosed in table XXX. In some aspects, modified AAV capsid proteins of the disclosure comprise insertions and/or deletions or variable region swaps that may alter the length of capsid protein sequence. It should be understood that point mutations referenced in table X1 are in reference to the wild type or unmodified AAV capsid protein sequence.

### Modified AAV Capsid Sequences

[0124] The disclosure provides modified AAV capsid protein amino acid sequences. The disclosure further provides nucleic acid sequences that encode modified AAV capsid proteins of the disclosure.

[0125] Modified AAV capsid proteins of the disclosure are set forth in Table 1. Table 1 lists the ID of the assembled AAV capsid comprising VP1, VP2, and VP3 capsid proteins including modified AAV capsid proteins as disclosed herein. Table 1 describes the serotype of the capsid protein as well as any modifications made to the capsid sequence.

TABLE 1
AAV capsid protein sequences of the disclosure

| | | | | VP1 | VP2/VP3 | VP1 | VP2/VP3 |
|---|---|---|---|---|---|---|---|
| | | | | amino | amino | nucleic | nucleic |
| | | | | acid | acid | acid | acid |
| | | | | SEQ | SEQ | SEQ | SEQ |
| Viral ID | VP1 | VP2/VP3 | Application | ID NO: | ID NO: | ID NO: | ID NO: |
| | Rh74 RGD | | | 10 | 10 | 27 | 27 |
| | insertion | | | | | | |
| | Rh8 RGD | | | 11 | 11 | 28 | 28 |
| | insertion | | | | | | |
| | Rh74 S371-VP2 | Rh74 S371-VP2 | | 12 | 12 | 29 | 29 |
| | (VP1 and VP3 | (VP1 and VP3 | | | | | |
| | wildtype Rh74) | wildtype Rh74) | | | | | |
| | Rh74 S519-VP2 | Rh74 S519-VP2 | | 13 | 13 | 30 | 30 |
| | (VP1 and VP3 | (VP1 and VP3 | | | | | |
| | wildtype Rh74) | wildtype Rh74) | | | | | |
| | Rh74 S961-VP2 | Rh74 S961-VP2 | | 14 | 14 | 31 | 31 |
| | (VP1 and VP3 | (VP1 and VP3 | | | | | |
| | wildtype Rh74) | wildtype Rh74) | | | | | |
| | Rh74 VP1 S519 | Rh74 VP1 S519 | | 15 | 15 | 32 | 32 |
| | (VP2 and VP3 | (VP2 and VP3 | | | | | |
| | wildtype Rh74) | wildtype Rh74) | | | | | |
| | Rh74 VP1 S961 | Rh74 VP1 S961 | | 16 | 16 | 33 | 33 |
| | (VP2 and VP3 | (VP2 and VP3 | | | | | |
| | wildtype Rh74) | wildtype Rh74) | | | | | |
| | Rh74 VP1 MuSK | Rh74 VP1 MuSK | | 17 | 17 | 34 | 34 |
| | VHH (VP2 and VP3 | VHH (VP2 and VP3 | | | | | |
| | wildtype Rh74) | wildtype Rh74) | | | | | |
| | AAVDJ 7m8 (AA) | | In vitro | 231 | 231 | 232 | 232 |
| | | | transduction | | | | |
| LBV9 | Rh8 W503A | | IV, muscle | 2 | 2 | 19 | 19 |
| LBV10 | Rh74 W505A | | IV, muscle | 1 | 1 | 18 | 18 |
| LBV11 | AAV9 VP1, 2 Rh8 | | IV, muscle | 3 | 3 | 20 | 20 |
| | VP3 | | | | | | |
| LBV12 | AAV8 VP1, 2 Rh8 | | IV, muscle | 4 | 4 | 21 | 21 |
| | VP3 | | | | | | |
| LBV13 | AAV1 VP1, 2 Rh8 | | IV, muscle | 5 | 5 | 22 | 22 |
| | VP3 | | | | | | |
| LBV14 | AAV7 VP1, 2 Rh8 | | IV, muscle | 6 | 6 | 23 | 23 |
| | VP3 | | | | | | |
| LBV15 | AAV9 VP1, 2 Rh74 | | IV, muscle | 7 | 7 | 24 | 24 |
| | VP3 | | | | | | |
| LBV16 | AAV1 VP1, 2 Rh74 | | IV, muscle | 8 | 8 | 25 | 25 |
| | VP3 | | | | | | |
| LBV17 | AAV7 VP1, 2 Rh74 | | IV, muscle | 9 | 9 | 26 | 26 |
| | VP3 | | | | | | |
| LBV18 | Rh8 VR-VIII P1 | | IV, muscle | — | — | — | — |
| LBV19 | Rh74 VR-VIII P1 | | IV, muscle | — | — | — | — |
| LBV20 | AAV9 with VR-IV | | IV, muscle | — | — | — | — |
| | and HI loop from | | | | | | |
| | Rh8 | | | | | | |
| LBV21 | AAV9 with VR-VIII | | IV, muscle | — | — | — | — |
| | and HI loop from | | | | | | |
| | Rh8 | | | | | | |
| LBV22 | AAV9 with VR-IV | | IV, muscle | — | — | — | — |
| | and HI loop from | | | | | | |
| | Rh74 | | | | | | |
| LBV23 | AAV9 with VR-VIII | | IV, muscle | — | — | — | — |
| | and HI loop from | | | | | | |
| | Rh74 | | | | | | |
| LBV24 | AAV8 with VR-IV | | IV, muscle | — | — | — | — |
| | from Rh8 | | | | | | |
| LBV25 | AAV8 with VR-VIII | | IV, muscle | — | — | — | — |
| | from Rh8 | | | | | | |
| LBV26 | AAV8 with VR-IV | | IV, muscle | — | — | — | — |
| | from Rh74 | | | | | | |
| LBV27 | AAV8 with VR-VIII | | IV, muscle | — | — | — | — |
| | from Rh74 | | | | | | |
| LBV29 | Rh74 VR8 mColQ | Rh74 (C01687) | IV, muscle | 35 | 84 | 133 | 181 |
| | (C01692) | | | | | | |
| LBV30 | Rh74 VR8 mColQ | Rh74 VR8 P1 | IV, muscle | 36 | 85 | 134 | 182 |
| | (C01692) | (C01765) | | | | | |
| LBV31 | PO1 VR8 mColQ | PO1 VR8 P1 | IV, muscle | 37 | 86 | 135 | 183 |
| | (C01839) | (C01840) | | | | | |
| LBV32 | Rh74 VR8 mColQ | PO1 VR8 P1 | IV, muscle | 38 | 87 | 136 | 184 |
| | (C01692) | (C01840) | | | | | |
| LBV33 | PO1 BR2mut VR8 | PO1 VR8 BR2mut | IV, muscle | 39 | 88 | 137 | 185 |
| | mColQ (C02036) | P1 (C02037) | | | | | |
| LBV34 | Rh74/PO1 VR8 | PO1 VR8 P1 | IV, muscle | 40 | 89 | 138 | 186 |
| | mColQ (C02038) | (C01840) | | | | | |
| LBV35 | AAV4/PO1 VR8 | PO1 VR8 P1 | IV, muscle | 41 | 90 | 139 | 187 |
| | mColQ (C02039) | (C01840) | | | | | |
| LBV41 | Rh74 VR8 mColQ | AAV9 VR8 P1 | IV, muscle | 42 | 91 | 140 | 188 |
| | (C01692) | (C01837) | | | | | |
| LBV42 | Rh74 VR8 P1 | AAV9 VR8 P1 | IV, muscle | 43 | 92 | 141 | 189 |
| | (C02041) | (C01837) | | | | | |
| LBV43 | Rh74 VR8 P1 | PO1 VR8 P1 | IV, muscle | 44 | 93 | 142 | 190 |
| | (C02041) | (C01840) | | | | | |
| LBV44 | AAV4/Rh74 VR8 | Rh74 VR8 P1 | IV, muscle | 45 | 94 | 143 | 191 |
| | ColQ (C02076) | (C01765) | | | | | |
| LBV45 | AAV4/Rh74 VR8 | Rh74 VR8 P1 | IV, muscle | 46 | 95 | 144 | 192 |
| | P1 (C02077) | (C01765) | | | | | |
| LBV46 | AAV9 VR8 ColQ | Rh74 VR8 P1 | IV, muscle | 47 | 96 | 145 | 193 |
| | (C01836) | (C01765) | | | | | |
| LBV47 | AAV9 VR8 P1 | Rh74 VR8 P1 | IV, muscle | 48 | 97 | 146 | 194 |
| | (C02086) | (C01765) | | | | | |
| LBV48 | AAV9 VR8 P1 | PO1 VR8 P1 | IV, muscle | 49 | 98 | 147 | 195 |
| | (C02086) | (C01840) | | | | | |
| LBV49 | PO1 VR8 mColQ | PO1 VR8 P1mod | IV, muscle | 50 | 99 | 148 | 196 |
| | (C01839) | (C02095) | | | | | |
| LBV50 | PO1 BR2mut VR8 | PO1 BR2mut VR8 | IV, muscle | 51 | 100 | 149 | 197 |
| | mColQ (C02036) | P1mod (C02096) | | | | | |
| LBV54 | AAV9 VR8 GGGGS | AAV9 | IV, muscle | 52 | 101 | 150 | 198 |
| | RGD | | | | | | |
| LBV55 | AAV9 VR8 VHH | AAV9 | IV, muscle | 53 | 102 | 151 | 199 |
| | RGD | | | | | | |
| LBV56 | AAV9 VR8 GP2 | AAV9 | IV, muscle | 54 | 103 | 152 | 200 |
| | RGD | | | | | | |
| LBV57 | AAV9 VR8 cRGD | AAV9 | IV, muscle | 55 | 104 | 153 | 201 |
| LBV58 | AAV9 VR8 Knottin | AAV9 | IV, muscle | 56 | 105 | 154 | 202 |
| | RGD | | | | | | |
| LBV59 | AAVpo1 VR8 | AAVpo1 | IV, muscle | 57 | 106 | 155 | 203 |
| | GGGGS RGD | | | | | | |
| LBV60 | AAVpo1 VR8 VHH | AAVpo1 | IV, muscle | 58 | 107 | 156 | 204 |
| | RGD | | | | | | |
| LBV61 | AAVpo1 VR8 GP2 | AAVpo1 | IV, muscle | 59 | 108 | 157 | 205 |
| | RGD | | | | | | |
| LBV62 | AAVpo1 VR8 | AAVpo1 | IV, muscle | 60 | 109 | 158 | 206 |
| | cRGD | | | | | | |
| LBV63 | AAVpo1 VR8 | AAVpo1 | IV, muscle | 61 | 110 | 159 | 207 |
| | Knottin RGD | | | | | | |
| LBV64 | AAV9 VR8 GGGGS | AAV9 VR8 | IV, muscle | 62 | 111 | 160 | 208 |
| | RGD | RGDLSTP | | | | | |
| LBV65 | AAV9 VR8 VHH | AAV9 VR8 | IV, muscle | 63 | 112 | 161 | 209 |
| | RGD | RGDLSTP | | | | | |
| LBV66 | AAV9 VR8 GP2 | AAV9 VR8 | IV, muscle | 64 | 113 | 162 | 210 |
| | RGD | RGDLSTP | | | | | |
| LBV67 | AAV9 VR8 cRGD | AAV9 VR8 | IV, muscle | 65 | 114 | 163 | 211 |
| | | RGDLSTP | | | | | |
| LBV68 | AAV9 VR8 Knottin | AAV9 VR8 | IV, muscle | 66 | 115 | 164 | 212 |
| | RGD | RGDLSTP | | | | | |
| LBV69 | AAVpo1 VR8 | AAVpo1 VR8 | IV, muscle | 67 | 116 | 165 | 213 |
| | GGGGS RGD | RGDLSTP | | | | | |
| LBV70 | AAVpo1 VR8 VHH | AAVpo1 VR8 | IV, muscle | 68 | 117 | 166 | 214 |
| | RGD | RGDLSTP | | | | | |
| LBV71 | AAVpo1 VR8 GP2 | AAVpo1 VR8 | IV, muscle | 69 | 118 | 167 | 215 |
| | RGD | RGDLSTP | | | | | |
| LBV72 | AAVpo1 VR8 | AAVpo1 VR8 | IV, muscle | 70 | 119 | 168 | 216 |
| | cRGD | RGDLSTP | | | | | |
| LBV73 | AAVpo1 VR8 | AAVpo1 VR8 | IV, muscle | 71 | 120 | 169 | 217 |
| | Knottin RGD | RGDLSTP | | | | | |
| LBV76 | PO1 VR8 mColQ | AAVpo1 VR8 | IV, muscle | 72 | 121 | 170 | 218 |
| | (C01839) | RGDLSTP | | | | | |
| LBV91 | AAVHSC16 VR8 | AAVHSC16 | IV, muscle | 73 | 122 | 171 | 219 |
| | VHH RGD | | | | | | |
| LBV92 | Rh74 VR8 mColQ | Rh74 VR8 P1 F503I | IV, muscle | 74 | 123 | 172 | 220 |
| | F503I G507R | G507R Y707C | | | | | |
| | Y707C | | | | | | |
| LBV93 | Rh74 VR8 mColQ | Rh74 VR8 | IV, muscle | 75 | 124 | 173 | 221 |
| | F503I G507R | RDGYVGL F503I | | | | | |
| | Y707C | G507R Y707C | | | | | |
| LBV94 | Rh74 VR8 4A | Rh74 VR8 | IV, muscle | 76 | 125 | 174 | 222 |
| | F503I G507R | RGDYVGL F503I | | | | | |
| | Y707C | G507R Y707C | | | | | |
| LBV95 | Rh74 VR8 4x z8 | Rh74 VR8 | IV, muscle | 77 | 126 | 175 | 223 |
| | F503I G507R | RGDYVGL F503I | | | | | |
| | Y707C | G507R Y707C | | | | | |
| LBV96 | AAVHSC16 VR8 | AAVHSC16 | IV, muscle | 78 | 127 | 176 | 224 |
| | Slit2 LG | | | | | | |
| LBV97 | AAVHSC16 VR8 | AAVHSC16 VR8 | IV, muscle | 79 | 128 | 177 | 225 |
| | Slit2 LG | RGDYVGL | | | | | |
| LBV98 | AAV9 VR8 Slit2 LG | AAV9 VR8 | IV, muscle | 80 | 129 | 178 | 226 |
| | | RGDYVGL | | | | | |
| LBV99 | Rh74 VR8 Slit2 LG | Rh74 F503I G507R | IV, muscle | 81 | 130 | 179 | 227 |
| | F503I G507R | Y707C | | | | | |
| | Y707C | | | | | | |
| LBV100 | Rh74 VR8 Slit2 LG | Rh74 VR8 | IV, muscle | 82 | 131 | 180 | 228 |
| | F503I G507R | RGDYVGL F503I | | | | | |
| | Y707C | G507R Y707C | | | | | |
| LBV101 | AAV9 VR4 swap | AAV9 VR4 swap | IV, muscle | 83 | — | — | 229 |
| | DGAATKN VR8 | DGAATKN VR8 | | | | | |
| | RGDYVGL | RGDYVGL | | | | | |
| LBV102 | AAV9 VR4 swap | AAV9 VR4 swap | IV, muscle | — | 132 | — | 230 |
| | TTGGHSS VR8 | TTGGHSS VR8 | | | | | |
| | RGDYVGL | RGDYVGL | | | | | |
| LBV28 | Rh74 VP1-S519 | Rh74 (C01687) | In vitro | 233 | 236 | 238 | 241 |
| | (C01688) | | transduction | | | | |
| LBV40 | Rh74 VP1 VR8 | Rh74 (C01687) | in vitro, lung, | 234 | 237 | 239 | 242 |
| | FnIII MSLN | | tumor | | | | |
| | (C02040) | | | | | | |
| LBV77 | AAVDJ 7m8 | AAVDJ 7m8 | In vitro | 235 | 235 | 240 | 240 |
| | (C01442) | (C01442) | transduction | | | | |
| LBV108 | Rh74 VR8 NK1 | Rh74 | Liver (hepatocyte) | 243 | 256 | 268 | 281 |
| | K1D | | targeting | | | | |
| LBV109 | Rh74 VR8 NK1 LE | Rh74 | Liver (hepatocyte) | 244 | 257 | 269 | 282 |
| | | | targeting | | | | |
| LBV110 | Rh74 VR8 VHH | Rh74 VR8 | Muscle-targeting, | 245 | 258 | 270 | 283 |
| | RGD F503I G507R | RGDYVGL F503I | IV delivery | | | | |
| | Y708C | G507R Y708C | | | | | |
| LBV111 | Rh74 VR8 VHH | Rh74 F503I G507R | Muscle-targeting, | 246 | 259 | 271 | 284 |
| | RGD F503I G507R | Y708C | IV delivery | | | | |
| | Y708C | | | | | | |
| LBV112 | AAV9 VR8 VHH | AAV9 Q590A | Muscle-targeting, | 247 | 260 | 272 | 285 |
| | RGD | | IV delivery | | | | |
| LBV113 | AAV9 VR8 VHH | AAV9 N498I | Muscle-targeting, | 248 | 261 | 273 | 286 |
| | RGD N498I | | IV delivery | | | | |
| LBV114 | AAV9 VR8 VHH | AAV9 VR8 | Muscle-targeting, | 249 | 262 | 274 | 287 |
| | RGD N498I | RGDYVGL N498I | IV delivery | | | | |
| LBV115 | AAV9 VR8 VHH | AAV9 586 QQNAA | Muscle-targeting, | 250 | 263 | 275 | 288 |
| | RGD | 590 | IV delivery | | | | |
| LBV116 | AAV9 VR8 VHH | AAV9 VR4 swap | Muscle-targeting, | 251 | 264 | 276 | 289 |
| | RGD | TTGGHSS VR8 | IV delivery | | | | |
| | | RGDYVGL | | | | | |
| LBV117 | AAV9 VR8 VHH | AAV9 G505R | Muscle-targeting, | 252 | 265 | 277 | 290 |
| | RGD G505R | | IV delivery | | | | |
| LBV118 | AAV9 VR8 VHH | AAV9 VR8 | Muscle-targeting, | 253 | 266 | 278 | 291 |
| | RGD G505R | RGDYVGL G505R | IV delivery | | | | |
| LBV120 | Rh74 F503I | Rh74 F503I G507R | Muscle-targeting, | 254 | 254 | 279 | 279 |
| | G507R Y708C | Y708C | IV delivery | | | | |
| LBV121 | AAV9 VR8 VHH | AAV9 VR8 | Muscle-targeting, | 255 | 267 | 280 | 292 |
| | RGD | RGDYVGL | IV delivery | | | | |
| | Wild-type AAV | | | 293 | 293 | 297 | 297 |
| | Rh74 | | | | | | |
| | Wild-type AAV2 | | | 294 | 294 | 298 | 298 |
| | Wild-type AAV9 | | | 295 | 295 | 299 | 299 |
| | Wild-type AAV | | | 296 | 296 | 300 | 300 |
| | Rh10 | | | | | | |

[0126] In some aspects, a modified AAV capsid VP1 protein provided herein comprises, consists essentially of, or consists of an amino acid sequence that is at least 80%, at least 85%, at least 90%, at least 95%, at least 96%, at least 97%, at least 98%, or at least 99%, or at least 100% (or any percentage in between) identical to a VP1 sequence set forth in Table 1.

[0127] In some embodiments, a modified AAV capsid VP2/3 protein provided herein comprises an amino acid sequence that is at least 80%, at least 85%, at least 90%, at least 95%, at least 96%, at least 97%, at least 98%, at least 99%, or at least 100% (or any percentage in between) identical to a VP2/VP3 sequence set forth in Table 1.

[0128] In some embodiments, a modified AAV capsid VP1 protein provided herein is encoded by a polynucleotide comprising a sequence that is at least 80%, at least 85%, at least 90%, at least 95%, at least 96%, at least 97%, at least 98%, or at least 99%, or at least 100% (or any percentage in between) identical to the VP1 sequence set forth in Table 1.

[0129] In some embodiments, a modified AAV capsid VP2/3 protein provided herein is encoded by a polynucleotide comprising a sequence that is at least 80%, at least 85%, at least 90%, at least 95%, at least 96%, at least 97%, at least 98%, or at least 99%, or at least 100% (or any percentage in between) identical to the VP2/VP3 sequence set forth in Table 1.

[0130] In some aspects, a muscle-targeted modified AAV capsid VP1 protein provided herein comprises, consists essentially of, or consists of an amino acid sequence that is at least 80%, at least 85%, at least 90%, at least 95%, at least 96%, at least 97%, at least 98%, or at least 99%, or at least 100% (or any percentage in between) identical to a VP1 sequence set forth in any Table 1.

[0131] In some embodiments, a muscle-targeted modified AAV capsid VP2/3 protein provided herein comprises an amino acid sequence that is at least 80%, at least 85%, at least 90%, at least 95%, at least 96%, at least 97%, at least 98%, at least 99%, or at least 100% (or any percentage in between) identical to a VP2/VP3 sequence set forth in Table 1.

[0132] In some embodiments, a muscle-targeted modified AAV capsid VP1 protein provided herein is encoded by a polynucleotide comprising a sequence that is at least 80%, at least 85%, at least 90%, at least 95%, at least 96%, at least 97%, at least 98%, or at least 99%, or at least 100% (or any percentage in between) identical to a VP1 sequence set forth in Table 1.

[0133] In some embodiments, a muscle-targeted modified AAV capsid VP2/3 protein provided herein is encoded by a polynucleotide comprising a sequence that is at least 80%, at least 85%, at least 90%, at least 95%, at least 96%, at least 97%, at least 98%, or at least 99%, or at least 100% (or any percentage in between) identical to a VP2/VP3 sequence set forth in Table 1.

[0134] In another aspect, provided herein are modified AAV capsid proteins that are useful for in vitro transduction.

[0135] In some aspects, a modified VP1 capsid protein sequence is at least 80%, at least 85%, at least 90%, at least 95%, at least 96%, at least 97%, at least 98%, or at least 99%, or at least 100% (or any percentage in between) identical to SEQ ID NO: 53. In some aspects, SEQ ID NO: 53 is an AAV9 VP1 capsid protein comprising a VHH RGD peptide insertion. In some aspects, the modified VP1 capsid protein set forth in SEQ ID NO: 53 is encoded by a nucleic acid sequence at least 80%, at least 85%, at least 90%, at least 95%, at least 96%, at least 97%, at least 98%, or at least 99%, or at least 100% (or any percentage in between) identical to SEQ ID NO: 151.

[0136] In some aspects, a modified VP2/VP3 capsid protein sequence is at least 80%, at least 85%, at least 90%, at least 95%, at least 96%, at least 97%, at least 98%, or at least 99%, or at least 100% (or any percentage in between) identical to SEQ ID NO: 102. In some aspects, SEQ ID NO: 102 is an AAV9 VP2/3 capsid protein. In some aspects, the VP2/VP3 capsid protein set forth in SEQ ID NO: 102 is encoded by a nucleic acid sequence at least 80%, at least 85%, at least 90%, at least 95%, at least 96%, at least 97%, at least 98%, or at least 99%, or at least 100% (or any percentage in between) identical to SEQ ID NO: 199.

[0137] In some aspects, a modified VP1 capsid protein sequence is at least 80%, at least 85%, at least 90%, at least 95%, at least 96%, at least 97%, at least 98%, or at least 99%, or at least 100% (or any percentage in between) identical to SEQ ID NO: 75. In some aspects, SEQ ID NO: 75 is an Rh74 VP1 capsid protein comprising an mColQ peptide insertion and mutations F503I, G507R, and Y707C (amino acid numbering in reference to wild-type Rh74 capsid protein). In some aspects, the modified VP1 capsid protein set forth in SEQ ID NO: 75 is encoded by a nucleic acid sequence at least 80%, at least 85%, at least 90%, at least 95%, at least 96%, at least 97%, at least 98%, or at least 99%, or at least 100% (or any percentage in between) identical to SEQ ID NO: 173.

[0138] In some aspects, a modified VP2/VP3 capsid protein sequence is at least 80%, at least 85%, at least 90%, at least 95%, at least 96%, at least 97%, at least 98%, or at least 99%, or at least 100% (or any percentage in between) identical to SEQ ID NO: 124. In some aspects, SEQ ID NO: 124 is a modified Rh74 VP2/3 capsid protein comprising an RGD peptide insertion and mutations F503I, G507R, and Y707C (amino acid numbering in reference to wild-type Rh74 capsid protein). In some aspects, the VP2/VP3 capsid protein set forth in SEQ ID NO: 124 is encoded by a nucleic acid sequence at least 80%, at least 85%, at least 90%, at least 95%, at least 96%, at least 97%, at least 98%, or at least 99%, or at least 100% (or any percentage in between) identical to SEQ ID NO: 221.

[0139] In some aspects, a modified VP1 capsid protein sequence is at least 80%, at least 85%, at least 90%, at least 95%, at least 96%, at least 97%, at least 98%, or at least 99%, or at least 100% (or any percentage in between) identical to SEQ ID NO: 245. In some aspects, SEQ ID NO: 245 is an Rh74 VP1 capsid protein comprising VHH RGD peptide insertion and mutations F503I, G507R, and Y707C (amino acid numbering in reference to wild-type Rh74 capsid protein). In some aspects, the modified VP1 capsid protein set forth in SEQ ID NO: 245 is encoded by a nucleic acid sequence at least 80%, at least 85%, at least 90%, at least 95%, at least 96%, at least 97%, at least 98%, or at least 99%, or at least 100% (or any percentage in between) identical to SEQ ID NO: 270.

[0140] In some aspects, a modified VP2/VP3 capsid protein sequence is at least 80%, at least 85%, at least 90%, at least 95%, at least 96%, at least 97%, at least 98%, or at least 99%, or at least 100% (or any percentage in between) identical to SEQ ID NO: 258. In some aspects, SEQ ID NO: 258 is a modified Rh74 VP2/3 capsid protein comprising an RGD peptide insertion and mutations F503I, G507R, and Y707C (amino acid numbering in reference to wild-type Rh74 capsid protein). In some aspects, the VP2/VP3 capsid protein set forth in SEQ ID NO: 258 is encoded by a nucleic acid sequence at least 80%, at least 85%, at least 90%, at least 95%, at least 96%, at least 97%, at least 98%, or at least 99%, or at least 100% (or any percentage in between) identical to SEQ ID NO: 283.

[0141] In some aspects, a modified VP1 capsid protein sequence is at least 80%, at least 85%, at least 90%, at least 95%, at least 96%, at least 97%, at least 98%, or at least 99%, or at least 100% (or any percentage in between) identical to SEQ ID NO: 249. In some aspects, SEQ ID NO: 249 is an AAV9 VP1 capsid protein comprising VHH RGD peptide insertion and mutation N498I (amino acid numbering in reference to wild-type AAV9 capsid protein). In some aspects, the modified VP1 capsid protein set forth in SEQ ID NO: 249 is encoded by a nucleic acid sequence at least 80%, at least 85%, at least 90%, at least 95%, at least 96%, at least 97%, at least 98%, or at least 99%, or at least 100% (or any percentage in between) identical to SEQ ID NO: 274.

[0142] In some aspects, a modified VP2/VP3 capsid protein sequence is at least 80%, at least 85%, at least 90%, at least 95%, at least 96%, at least 97%, at least 98%, or at least 99%, or at least 100% (or any percentage in between) identical to SEQ ID NO: 262. In some aspects, SEQ ID NO: 262 is a modified AAV9 VP2/3 capsid protein comprising an RGD peptide insertion and mutation N498L (amino acid numbering in reference to wild-type AAV9 capsid protein). In some aspects, the VP2/VP3 capsid protein set forth in SEQ ID NO: 262 is encoded by a nucleic acid sequence at least 80%, at least 85%, at least 90%, at least 95%, at least 96%, at least 97%, at least 98%, or at least 99%, or at least 100% (or any percentage in between) identical to SEQ ID NO: 287.

[0143] In some aspects, a modified VP1 capsid protein sequence is at least 80%, at least 85%, at least 90%, at least 95%, at least 96%, at least 97%, at least 98%, or at least 99%, or at least 100% (or any percentage in between) identical to SEQ ID NO: 255. In some aspects, SEQ ID NO: 255 is an AAV9 VP1 capsid protein comprising VHH RGD peptide insertion. In some aspects, the modified VP1 capsid protein set forth in SEQ ID NO: 255 is encoded by a nucleic acid sequence at least 80%, at least 85%, at least 90%, at least 95%, at least 96%, at least 97%, at least 98%, or at least 99%, or at least 100% (or any percentage in between) identical to SEQ ID NO: 280.

[0144] In some aspects, a modified VP2/VP3 capsid protein sequence is at least 80%, at least 85%, at least 90%, at least 95%, at least 96%, at least 97%, at least 98%, or at least 99%, or at least 100% (or any percentage in between) identical to SEQ ID NO: 267. In some aspects, SEQ ID NO: 267 is a modified AAV9 VP2/3 capsid protein comprising RGD peptide insertion. In some aspects, the VP2/VP3 capsid protein set forth in SEQ ID NO: 267 is encoded by a nucleic acid sequence at least 80%, at least 85%, at least 90%, at least 95%, at least 96%, at least 97%, at least 98%, or at least 99%, or at least 100% (or any percentage in between) identical to SEQ ID NO: 292.

### Modified AAV Capsids

[0145] Modified AAV capsid proteins of the disclosure can be used to form AAV capsids, thereby forming a modified AAV capsid. The modified AAV capsid proteins provided herein may be used to construct modified, chimeric, and/or hybrid AAV capsids. An AAV capsid provided herein may comprise any combination of VP1, VP2, and VP3 sequences or any combination ov VP1 and VP2/VP3 proteins.

[0146] In some embodiments, a modified AAV capsid provided herein comprises a wild-type or modified VP1 capsid sequence at least 80%, at least 85%, at least 90%, at least 95%, at least 96%, at least 97%, at least 98%, or at least 99%, or at least 100% (or any percentage in between) identical to the VP1 sequences set forth in Table 1 and the SEQ ID NOs referenced therein. In some embodiments, a modified AAV capsid provided herein comprises a wild-type or modified VP2/VP3 capsid sequence at least 80%, at least 85%, at least 90%, at least 95%, at least 96%, at least 97%, at least 98%, or at least 99%, or at least 100% (or any percentage in between) identical to the VP2/VP3 sequences set forth in Table 1 and the SEQ ID NOs referenced therein. In some embodiments, a modified AAV capsid of the disclosure comprises a VP1 capsid protein selected from a sequence listed in Table 1 and a VP2/VP3 capsid protein selected from a sequence listed in Table 1.

[0147] In some aspects, a modified AAV capsid comprises a VP1 capsid protein sequence at least 80%, at least 85%, at least 90%, at least 95%, at least 96%, at least 97%, at least 98%, or at least 99%, or at least 100% (or any percentage in between) identical to SEQ ID NO: 53 and a VP2/VP3 capsid protein sequence at least 80%, at least 85%, at least 90%, at least 95%, at least 96%, at least 97%, at least 98%, or at least 99%, or at least 100% (or any percentage in between) identical to SEQ ID NO: 102. In some aspects, an AAV capsid having said sequences is referred to as LBV55. LBV55 comprises an AAV9 VP1 capsid protein comprising a VHH RGD peptide insertion and an AAV9 VP2/VP3 capsid protein.

[0148] In some aspects, a modified AAV capsid comprises a VP1 capsid protein sequence at least 80%, at least 85%, at least 90%, at least 95%, at least 96%, at least 97%, at least 98%, or at least 99%, or at least 100% (or any percentage in between) identical to SEQ ID NO: 75 and a VP2/VP3 capsid protein sequence at least 80%, at least 85%, at least 90%, at least 95%, at least 96%, at least 97%, at least 98%, or at least 99%, or at least 100% (or any percentage in between) identical to SEQ ID NO: 124. In some aspects, an AAV capsid having said sequences is referred to as LBV93. LBV93 comprises an Rh74 VP1 capsid protein comprising an mColQ peptide insertion and mutations F503I, G507R, and Y707C (amino acid numbering in reference to wild-type Rh74 capsid protein) and an Rh74 VP2/VP3 capsid protein comprising an RGD peptide insertion and mutations F503I, G507R, and Y707C (amino acid numbering in reference to wild-type Rh74 capsid protein).

[0149] In some aspects, a modified AAV capsid comprises a VP1 capsid protein sequence at least 80%, at least 85%, at least 90%, at least 95%, at least 96%, at least 97%, at least 98%, or at least 99%, or at least 100% (or any percentage in between) identical to SEQ ID NO: 245 and a VP2/VP3 capsid protein sequence at least 80%, at least 85%, at least 90%, at least 95%, at least 96%, at least 97%, at least 98%, or at least 99%, or at least 100% (or any percentage in between) identical to SEQ ID NO: 258. In some aspects, an AAV capsid having said sequences is referred to as LBV110. LBV110 comprises an Rh74 VP1 capsid protein comprising VHH RGD peptide insertion and mutations F503I, G507R, and Y707C (amino acid numbering in reference to wild-type Rh74 capsid protein) and an Rh74 VP2/VP3 capsid protein comprising an RGD peptide insertion and mutations F503I, G507R, and Y707C (amino acid numbering in reference to wild-type Rh74 capsid protein).

[0150] In some aspects, a modified AAV capsid comprises a VP1 capsid protein sequence at least 80%, at least 85%, at least 90%, at least 95%, at least 96%, at least 97%, at least 98%, or at least 99%, or at least 100% (or any percentage in between) identical to SEQ ID NO: 249 and a VP2/VP3 capsid protein sequence at least 80%, at least 85%, at least 90%, at least 95%, at least 96%, at least 97%, at least 98%, or at least 99%, or at least 100% (or any percentage in between) identical to SEQ ID NO: 262. In some aspects, an AAV capsid having said sequences is referred to as LBV114. LBV114 comprises an AAV9 VP1 capsid protein comprising a VHH RGD peptide insertion and mutation N498I (amino acid numbering in reference to wild-type AAV9 capsid protein) and an AAV9 VP2/VP3 capsid protein comprising an RGD peptide insertion and mutation N498L (amino acid numbering in reference to wild-type AAV9 capsid protein).

[0151] In some aspects, a modified AAV capsid comprises a VP1 capsid protein sequence at least 80%, at least 85%, at least 90%, at least 95%, at least 96%, at least 97%, at least 98%, or at least 99%, or at least 100% (or any percentage in between) identical to SEQ ID NO: 255 and a VP2/VP3 capsid protein sequence at least 80%, at least 85%, at least 90%, at least 95%, at least 96%, at least 97%, at least 98%, or at least 99%, or at least 100% (or any percentage in between) identical to SEQ ID NO: 267. In some aspects, an AAV capsid having said sequences is referred to as LBV121. LBV121 comprises an AAV9 VP1 capsid protein comprising a VHH RGD peptide insertion and an AAV9 VP2/VP3 capsid protein comprising an RGD peptide insertion.

[0152] A modified AAV capsid of the disclosure show improved transduction efficiency compared to the parental or wild-type AAV capsid. In some aspects, the improved transduction is in muscle tissue. In some aspects, the muscle tissue is skeletal muscle, smooth muscle, or cardiac muscle. In some embodiments, the transduction efficiency of a modified muscle-targeted AAV capsid provided herein in a muscle cell is increased by at least about 10%, at least about 20%, at least about 30%, at least about 40%, at least about 50%, at least about 60%, at least about 70%, at least about 80%, or at least about 90% compared to the parental AAV capsid as determined by immunofluorescence. In some embodiments, the transduction efficiency of a modified muscle-targeted AAV capsid provided herein in a muscle cell is increased by at least about 1.1-fold, at least about 1.2-fold, at least about 1.3-fold, at least about 1.4-fold, at least about 1.5-fold, at least about 2-fold, at least about 5-fold, at least about 10-fold, at least about 20-fold, at least about 30-fold, at least about 40-fold, or at least about 50-fold compared to the parental AAV capsid as determined by immunofluorescence.

### Viral Vectors and Pharmaceutical Compositions

[0153] The AAV capsids of the disclosure may be used in any suitable AAV viral vector. The AAV capsid surrounds a small, single-stranded DNA genome of approximately 4.8 kilobases (kb). The genome of an AAV contains three genes, Rep (Replication), Cap (Capsid), and aap (Assembly) flanked by inverted terminal repeats (ITRs) that are required for genome replication and packaging. See Naso et al., BioDrugs. 2017; 31(4): 317-334. Recombinant AAV vectors lack the viral gene and instead comprise a transgene flanked by the two viral ITRs.

[0154] Thus, in another aspect, provided herein is an AAV viral vectors comprising a modified AAV capsid provided herein. In some embodiments, the AAV viral vector comprises a transgene.

[0155] Also provided herein is a pharmaceutical composition comprising an AAV viral vector comprising a modified AAV capsid provided herein and a pharmaceutically acceptable carrier. A pharmaceutical composition may be formulated for any suitable route of administration, including, for example, intraveneous, intrathecal, intracranial, or intraocular administration. Pharmaceutical compositions for use as disclosed herein may comprise a protein(s) or a polynucleotide encoding the protein(s), optionally comprised in an AAV, which is optionally also immune orthogonal, in combination with one or more pharmaceutically or physiologically acceptable carriers, diluents or excipients. Such compositions may comprise buffers such as neutral buffered saline, phosphate buffered saline and the like; carbohydrates such as glucose, mannose, sucrose or dextrans, mannitol; proteins; polypeptides or amino acids such as glycine; antioxidants; chelating agents such as EDTA or glutathione; adjuvants (e.g., aluminum hydroxide); and preservatives. Compositions of the disclosure may be formulated for routes of administration, such as e.g., oral, enteral, topical, transdermal, intranasal, and/or inhalation; and for routes of administration via injection or infusion such as, e.g., intravenous, intramuscular, subpial, intrathecal, intraparenchymal, intrathecal, intrastriatal, subcutaneous, intradermal, intraperitoneal, intratumoral, intravenous, intraocular, and/or parenteral administration. In certain embodiments, the compositions of the present disclosure are formulated for intracerebral or intrastriatal administration.

### Methods of Use

[0156] The disclosure provides a method of delivering a transgene or NOI to a tissue of interest in a subject comprising administering an AAV viral vector comprising a modified AAV capsid protein of the disclosure. In one embodiment, the disclosure provides a method of modifying an activity of a protein encoded by an RNA molecule comprising contacting an AAV viral vector of the disclosure and the RNA molecule under conditions suitable for binding of one or more of the guide RNA or the RNA-binding protein or the fusion protein (or a portion thereof) to the RNA molecule.

[0157] The disclosure provides a method of modifying the level of expression of an RNA molecule of the disclosure or a protein encoded by the RNA molecule comprising contacting an AAV viral vector of the disclosure and a cell comprising the RNA molecule under conditions suitable for binding of one or more of the guide RNA or the RNA-binding protein or fusion protein (or a portion thereof) to the RNA molecule. In some embodiments, the cell is in vivo, in vitro, ex vivo or in situ. In some embodiments, the AAV viral vector of the disclosure comprises a guide RNA of the disclosure and an RNA-binding protein or fusion protein of the disclosure.

[0158] The disclosure provides a method of modifying an activity of a protein encoded by an RNA molecule comprising contacting an AAV viral vector of the disclosure and a cell comprising the RNA molecule under conditions suitable for binding of one or more of the guide RNA or the RNA-binding protein or fusion protein (or a portion thereof) to the RNA molecule.

[0159] The disclosure provides a method of modifying the level of expression of an RNA molecule of the disclosure or a protein encoded by the RNA molecule comprising contacting an AAV viral vector of the disclosure and the RNA molecule under conditions suitable for RNA nuclease activity wherein the RNA-binding protein or fusion protein induces a break in the RNA molecule.

[0160] The disclosure provides a method of modifying an activity of a protein encoded by an RNA molecule comprising contacting an AAV viral vector of the disclosure and the RNA molecule under conditions suitable for RNA nuclease activity wherein the RNA-binding protein or fusion protein induces a break in the RNA molecule.

[0161] The disclosure provides a method of modifying a level of expression of an RNA molecule of the disclosure or a protein encoded by the RNA molecule comprising contacting an AAV viral vector of the disclosure and a cell comprising the RNA molecule under conditions suitable for RNA nuclease activity wherein the RNA-binding protein or fusion protein induces a break in the RNA molecule. In some embodiments, the cell is in vivo, in vitro, ex vivo or in situ. In some embodiments, the AAV viral vector of the disclosure comprises a guide RNA of the disclosure and an RNA-binding fusion protein of the disclosure.

[0162] The disclosure provides a method of modifying an activity of a protein encoded by an RNA molecule comprising contacting an AAV viral vector of the disclosure and a cell comprising the RNA molecule under conditions suitable for RNA nuclease activity wherein the RNA-binding protein or fusion protein induces a break in the RNA molecule. In some embodiments, the cell is in vivo, in vitro, ex vivo or in situ. In some embodiments, an AAV viral vector of the disclosure comprises a guide RNA or a single guide RNA of the disclosure and a nucleic acid sequence encoding an RNA-binding protein or fusion protein of the disclosure.

[0163] The disclosure provides a method of treating a subject having a disease or disorder comprising administering to a subject a therapeutically effective amount of an AAV viral vector or a pharmaceutical composition of the disclosure. In some aspects, the disease or disorder muscular and/or neuromuscular disease or disorder. In some aspects, the muscular and/or neuromuscular disorder is muscular dystrophy or myotonic dystrophy.

[0164] The disclosure provides a method of treating a disease in a patient in need of such treatment comprising administering to the patient a therapeutically effective amount of an AAV viral vector or a pharmaceutical composition of the disclosure, wherein an AAV viral vector or a pharmaceutical composition comprises a vector comprising a guide RNA of the disclosure and a nucleic acid sequence encoding an RNA-binding protein or an RNA-binding protein fusion protein of the disclosure, wherein an AAV viral vector or a pharmaceutical composition modifies, reduces, destroys, knocks down or ablates a level of expression of a toxic repeat RNA (compared to the level of expression of a toxic repeat RNA treated with a non-targeting (NT) control or compared to no treatment). In another embodiment, the level of reduction is 1-fold or greater. In another embodiment, the level of reduction is 2-fold, 3-fold, 4-fold, 5-fold, 6-fold, 7-fold, 8-fold, 9-fold or 10-fold. In another embodiment, the level of reduction is 10-fold or greater. In another embodiment, the level of reduction is between 10-fold and 20-fold. In another embodiment, the level of reduction is 11-fold, 12-fold, 13-fold, 14-fold, 15-fold, 16-fold, 17-fold, 18-fold, 19-fold, or 20-fold. In another embodiment, the gene therapy compositions disclosed herein when administered to a patient lead to 20%-100% destruction of the toxic repeat RNA. In one embodiment, the % elimination of the toxic repeat RNA is any of 20-99%, 25%-99%, 50%-99%, 80%-99%, 90%-99%, 95%-99%. In one embodiment, the % elimination is 90%, 91%, 92%, 93%, 94%, 95%, 96%, 97%, 98%, or 99%. In another embodiment, % elimination is complete elimination or 100% elimination of the toxic repeat RNA.

[0165] In some embodiments of the methods of the disclosure, a subject of the disclosure has been diagnosed with a disease to be treated. In some embodiments, the subject of the disclosure presents at least one sign or symptom of a disorder or disease to be treated. In some embodiments, the subject of the disclosure presents at least one sign or symptom of a disease.

[0166] In some embodiments of the methods of the disclosure, a subject of the disclosure is female. In some embodiments of the methods of the disclosure, a subject of the disclosure is male. In some embodiments, a subject of the disclosure has two XX or XY chromosomes. In some embodiments, a subject of the disclosure has two XX or XY chromosomes and a third chromosome, either an X or a Y.

[0167] In some embodiments of the methods of the disclosure, a subject of the disclosure is a neonate, an infant, a child, an adult, a senior adult, or an elderly adult. In some embodiments of the methods of the disclosure, a subject of the disclosure is at least 1, 2, 3, 4, 5, 6, 7, 8, 9, 10, 11, 12, 13, 14, 15, 16, 17, 18, 19, 20, 21, 22, 23, 24, 25, 26, 27, 28, 29, 30 or 31 days old. In some embodiments of the methods of the disclosure, a subject of the disclosure is at least 1, 2, 3, 4, 5, 6, 7, 8, 9, 10, 11 or 12 months old. In some embodiments of the methods of the disclosure, a subject of the disclosure is at least 1, 2, 3, 4, 5, 6, 7, 8, 9, 10, 15, 20, 25, 30, 35, 40, 45, 50, 55, 60, 65, 70, 75, 80, 85, 90, 95, 100 or any number of years or partial years in between of age.

[0168] In some embodiments of the methods of the disclosure, a subject of the disclosure is a mammal. In some embodiments, a subject of the disclosure is a non-human mammal.

[0169] In some embodiments of the methods of the disclosure, a subject of the disclosure is a human.

[0170] In some embodiments of the methods of the disclosure, a therapeutically effective amount comprises a single dose of a composition of the disclosure. In some embodiments, a therapeutically effective amount comprises a therapeutically effective amount comprises at least one dose of a composition of the disclosure. In some embodiments, a therapeutically effective amount comprises a therapeutically effective amount comprises one or more dose(s) of a composition of the disclosure.

[0171] In some embodiments of the methods of the disclosure, a therapeutically effective amount eliminates a sign or symptom of the disease or disorder. In some embodiments, a therapeutically effective amount reduces a severity of a sign or symptom of the disease or disorder.

[0172] In some embodiments of the methods of the disclosure, a therapeutically effective amount eliminates the disease or disorder.

[0173] In some embodiments of the methods of the disclosure, a therapeutically effective amount prevents an onset of a disease or disorder. In some embodiments, a therapeutically effective amount delays the onset of a disease or disorder. In some embodiments, a therapeutically effective amount reduces the severity of a sign or symptom of the disease or disorder. In some embodiments, a therapeutically effective amount improves a prognosis for the subject.

[0174] In some embodiments of the methods of the disclosure, a composition of the disclosure is administered to the subject via intracerebral administration. In some embodiments, the composition of the disclosure is administered to the subject by an intrastriatal route. In some embodiments, the composition of the disclosure is administered to the subject by a stereotaxic injection or an infusion. In some embodiments, the composition is administered to the brain. In some embodiments of the methods of the disclosure, a composition of the disclosure is administered to the subject locally.

[0175] In some embodiments, the compositions disclosed herein are formulated as pharmaceutical compositions. Briefly, pharmaceutical compositions for use as disclosed herein may comprise a protein(s) or a polynucleotide encoding the protein(s), optionally comprised in an AAV, which is optionally also immune orthogonal, in combination with one or more pharmaceutically or physiologically acceptable carriers, diluents or excipients. Such compositions may comprise buffers such as neutral buffered saline, phosphate buffered saline and the like; carbohydrates such as glucose, mannose, sucrose or dextrans, mannitol; proteins; polypeptides or amino acids such as glycine; antioxidants; chelating agents such as EDTA or glutathione; adjuvants (e.g., aluminum hydroxide); and preservatives. Compositions of the disclosure may be formulated for routes of administration, such as e.g., oral, enteral, topical, transdermal, intranasal, and/or inhalation; and for routes of administration via injection or infusion such as, e.g., intravenously, intrathecally, intracerebrally, intraventricularly, intranasally, intratracheally, intra-aurally, intra-ocularly, or peri-ocularly, orally, rectally, transmucosally, inhalationally, transdermally, parenterally, subcutaneously, intradermally, intramuscularly, intracisternally, intranervally, intrapleurally, topically, intralymphatically, intracisternally; such introduction may also be intra-arterial, intracardiac, subventricular, epidural, intracerebral, intracerebroventricular, subretinal, intravitreal, intraarticular, intraperitoneal, intrauterine, systemically or any combination thereof.

[0176] In some aspects, enhanced transduction in muscle tissue occurs following delivery of AAV viral vectors comprising modified AAV capsid proteins. In some aspects, enhanced transduction in ocular tissue occurs following subretinal delivery of AAV vectors comprising modified AAV capsid proteins relative to AAV capsids comprising unmodified, wild-type, or parental AAV capsid proteins. In some aspects, enhanced transduction in neural tissue occurs following delivery of AAV vectors comprising modified AAV capsid proteins relative to AAV capsids comprising unmodified, wild-type, or parental AAV capsid proteins. In some aspects, reduced or no liver or hepatocyte transduction occurs following systemic delivery of AAV vectors comprising modified AAV capsids relative to AAV capsids comprising unmodified, wild-type, or parental AAV capsid proteins. In some aspects, reduced or no neutralizing antibody binding occurs following systemic delivery of AAV vectors comprising modified AAV capsids relative to AAV capsids comprising unmodified, wild-type, or parental AAV capsid proteins. In some aspects, neutralizing antibody titer is minimal following delivery of AAV vectors comprising modified AAV capsids relative to AAV capsids comprising unmodified, wild-type, or parental AAV capsid proteins. In some aspects, neutralizing antibody titer is reduced compared to delivery of AAV vectors comprising nonmodified AAV capsids relative to AAV capsids comprising unmodified, wild-type, or parental AAV capsid proteins.

### Cells

[0177] In some embodiments of the compositions and methods of the disclosure, a cell of the disclosure is a prokaryotic cell.

[0178] In some embodiments of the compositions and methods of the disclosure, a cell of the disclosure is a eukaryotic cell. In some embodiments, the cell is a mammalian cell. In some embodiments, the cell is a bovine, murine, feline, equine, porcine, canine, simian, or human cell. In some embodiments, the cell is a non-human mammalian cell such as a non-human primate cell.

[0179] In some embodiments, a cell of the disclosure is a somatic cell. In some embodiments, a cell of the disclosure is a germline cell. In some embodiments, a germline cell of the disclosure is not a human cell.

[0180] In some embodiments of the compositions and methods of the disclosure, a cell of the disclosure is a stem cell. In some embodiments, a cell of the disclosure is an embryonic stem cell. In some embodiments, an embryonic stem cell of the disclosure is not a human cell. In some embodiments, a cell of the disclosure is a multipotent stem cell or a pluripotent stem cell. In some embodiments, a cell of the disclosure is an adult stem cell. In some embodiments, a cell of the disclosure is an induced pluripotent stem cell (iPSC). In some embodiments, a cell of the disclosure is a hematopoietic stem cell (HSC).

[0181] In some embodiments of the compositions and methods of the disclosure, a somatic cell of the disclosure is a muscle cell. In some embodiments, a muscle cell of the disclosure is a myoblast or a myocyte. In some embodiments, a muscle cell of the disclosure is a cardiac muscle cell, skeletal muscle cell or smooth muscle cell. In some embodiments, a muscle cell of the disclosure is a striated cell. In one embodiment, a cell or cells of a patient treated with compositions disclosed herein include, without limitation, skeletal muscle (developing and mature muscle fibers and satellite cells), neuromuscular junction, cardiomyocytes, smooth muscle cells, peripheral nervous system (neurons), peripheral motor neurons, and/or sensory neurons.

[0182] In some embodiments of the compositions and methods of the disclosure, a somatic cell of the disclosure is a fibroblast or an epithelial cell. In some embodiments, an epithelial cell of the disclosure forms a squamous cell epithelium, a cuboidal cell epithelium, a columnar cell epithelium, a stratified cell epithelium, a pseudostratified columnar cell epithelium or a transitional cell epithelium. In some embodiments, an epithelial cell of the disclosure forms a gland including, but not limited to, a pineal gland, a thymus gland, a pituitary gland, a thyroid gland, an adrenal gland, an apocrine gland, a holocrine gland, a merocrine gland, a serous gland, a mucous gland and a sebaceous gland. In some embodiments, an epithelial cell of the disclosure contacts an outer surface of an organ including, but not limited to, a lung, a spleen, a stomach, a pancreas, a bladder, an intestine, a kidney, a gallbladder, a liver, a larynx or a pharynx. In some embodiments, an epithelial cell of the disclosure contacts an outer surface of a blood vessel or a vein.

[0183] In some embodiments of the compositions and methods of the disclosure, a somatic cell of the disclosure is a primary cell.

[0184] In some embodiments of the compositions and methods of the disclosure, a somatic cell of the disclosure is a cultured cell.

[0185] In some embodiments of the compositions and methods of the disclosure, a somatic cell of the disclosure is in vivo, in vitro, ex vivo or in situ.

In some embodiments of the compositions and methods of the disclosure, a somatic cell of the disclosure is autologous or allogeneic.

### EXAMPLES

[0186] The examples provided in this section are intended for illustration only and are not intended to limit the invention.

### Example 1: VP1-Specific Display of Targeting Peptides

[0187] The use of a targeting peptide can increase transfection efficacy in a certain tissue or cell type. However, how a peptide is displayed on an AAV capsid influences the effect it has.

[0188] FIG. 5 show immunofluorescence images of HEK293 cells transfected with an AAV Rh74 particle comprising a peptide insertion. Both eAAV Rh74 and LBV28 contain the insulin receptor targeting peptide, S519. In eAAV Rh74 the insertion site VR8 of VP1, VP2, and VP3 at a 1 to 10 of mutant to wild-type protein. LBV28 has the peptide inserted specifically in VR8 VP1 and not in VP2 or VP3. These data show that VP1-specific insertion of LBV28 results in greater effectiveness of the targeting peptide. Without wishing to be bound by theory, it is hypothesized that the VP1-specific insertion allows the peptide to be displayed more freely, which results in greater effectiveness, while on the other hand problems with capsid assembly limit the use of linkers when a peptide is inserted into all the VP1-3 proteins.

### Example 2: Generation and Testing of Novel Muscle-Targeted AAV Capsids

[0189] Novel and improved muscle-targeting capsid proteins from AAV9, AAVRh74, and AAVpo1. were rationally designed. Rationally targeted capsid mutations and insertions were cloned and HEK293 cells and iodixanol gradient ultra-centrifuge purification were used to produce GFP and Luciferase reporter viruses. Coomassie stain was used to verify that the preparations were free of protein contaminants. Endotoxin levels must be less than 1.5 EU/ml. Titers were measured by ITR qPCR and engineered capsid must produce at 25% of parental capsid to progress to in vitro studies. C2C12 myoblast cells were used to evaluate potential muscle-targeting of engineered capsids. Cells were cultured Dulbecco's Modified Eagle Medium (DMEM) with 10% FBS and transduction was visually assessed by GFP signal (both the percentage of GFP+ cells and level of GFP expression) using a fluorescent microscope. Briefly, C2C12 cells were seeded at density of 5E4 cells per well in 48 well plate on Day 1. On Day 3, cells were transduced with AAVs at multiplicity of infection ((MOI); number of viral genomes delivered divided by total number of cells) of 1E5 and 1E6 based on 1E5 cells per well. GFP signal was monitored on days 4-10.

[0190] AAV capsids having modified AAV capsid proteins comprising RGD peptide insertions were evaluated. LBV54 comprises a flexible linker RGD peptide insertion in AAV9 VR VIII (VR8). LBV55 comprises a VHH RGD peptide insertion in AAV9 VR VIII (VR8). LBV56 comprises a GP2 RGD peptide insertion in AAV9 VR VIII (VR8). LBV57 comprises a cyclic peptide RGD peptide insertion in AAV9 VR VIII (VR8). LBV58 comprises a knottin RGD peptide insertion in AAV9 VR VIII (VR8) (FIG. 8). AAV capsids having modified AAV capsid proteins comprising a ColQ peptide insertion was also evaluated (LBV31).

[0191] Vector genome yield and the peptides are summarized in 2.

TABLE 2
Alternative RGD Display Scaffolds

| | | Titer | Productivity |
|---|---|---|---|
| Name | Genome | (vg/mL) | (vg/cell) |
| AAV9 | tCAG Firefly Luciferase | 2.16E+14 | 1.89E+05 |
| | P2A Clover3 | | |
| LBV54 | tCAG Firefly Luciferase | 2.06E+14 | |
| | P2A Clover3 | | |
| LBV55 (AAV9- | tCAG Firefly Luciferase | 5.71E+13 | 5.00E+04 |
| based) | P2A Clover3 | | |
| AAVpo1 | tCAG Firefly Luciferase | 1.67E+14 | 1.46E+05 |
| | P2A Clover3 | | |
| LBV56 | tCAG Firefly Luciferase | 7E+11 | |
| | P2A Clover3 | | |
| LBV57 | tCAG Firefly Luciferase | 4.69E+11 | |
| | P2A Clover3 | | |
| LBV58 | tCAG Firefly Luciferase | 1.18E+12 | |
| | P2A Clover3 | | |
| AAV2 | tCAG Firefly Luciferase | 1.24E+11 | |
| | P2A Clover3 | | |
| LBV31 (AAVpo1- | tCAG Firefly Luciferase | 1.24E+14 | 1.09E+05 |
| based) | P2A Clover3 | | |
| AAVRh74 | CMV GFP | 1.23E+14 | 1.08E+05 |
| LBV30 (AAVRh74- | CMV GFP | 8.10E+13 | 7.09E+04 |
| based) | | | |

[0192] 101941 Results are shown in FIGS. 6A through 6D). A significant enhancement of C2C12 transduction was observed 5 days post-transduction for VHHT RGD insertion capsid LBV55 compared to wild-type AAV9 (FIG. 6A and FIG. 6B3). Further, a significant transduction enhancement was observed 4 days post-transduction for modified PO1 capsid LBV31 relative to wild-type AAVPO1 (FIG. 6C). An enhancement in transduction for Rh774-derived LBV30 was observed 6 days post transduction relative to Rh74.

### Example 3: Ex Vivo Imaging of AAV9, LBV30, and LBV31

[0193] In order to evaluate in vivo targeting of the modified AAV capsids, mice were injected intravenously with reporter viruses at a dose of 1E12 vg/mouse. Ex vivo imaging of skeletal, smooth, cardiac muscles, CNS, liver, and other internal organs was carried out 4 weeks post injection. Results are shown in FIG. 7A-7C. FIG. 7A shows representative images comparing the modified capsid to the LBV30 and LBV31 variants. LBV30 is an AAV Rh74 capsid comprising a modified VP1 capsid protein having a ColQ peptide insertion and a VP2/VP3 capsid protein having an RGD peptide insertion. LBV31 is an AAV PO1 capsid comprising a modified VP1 capsid protein having a ColQ peptide insertion and a VP2/VP3 capsid protein having an RGD peptide insertion. Data in FIG. 7B indicates that LBV31 has limited transduction of off-target tissues, while data in FIG. 7C indicates that LBV31 transduces target muscles. These data show that LBV31 shows a favorable profile of reasonable skeletal, smooth, and cardiac muscle transduction and little to no transduction of multiple non-muscle tissues (most importantly no transduction of the liver). LBV30 shows increased transduction of some muscles relative to AAV9. However, there is also a significant amount of liver transduction.

### Example 4: Liver De-Targeting Mutations in Modified AAV Capsid Proteins

[0194] LBV55 displayed enhanced muscle transduction. To enhance liver de-targeting, mutations F501I, G505R, and Y706C were introduced into VP1 and VP2/VP3 of LBV55 to generate LBV91. Additionally, LBV92 was generated from LBV30 by incorporating mutations F501I, G505R, and Y706C into VP1 and VP2/VP3. Viral Vectors were prepared (Table 3) comprising luciferase reporting vector pAAV-tCAG Firefly Luciferase-P2A-Clover3 WPRE and administered to mice (Table 4). Mouse IV injection of Luciferase reporter viruses, 1E12 vg/mouse. Ex vivo imaging of skeletal, smooth, cardiac muscles, CNS, liver, and other internal organs at 2-4 weeks post injection.

TABLE 3
AAV Vectors used in Study

| | VP1 | VP2/VP3 | |
|---|---|---|---|
| AAV9 | AAV9 | AAV9 | |
| LBV55 | AAV9 VR8 VHH | AAV9 | Muscle targeting |
| | RGD | | |
| LBV91 | AAV9 F501I | AAV9 F501I | Muscle targeting + |
| | G505R VR8 VHH | G505R Y706C | liver de-targeting |
| | RGD Y706C | | |
| Rh74 | Rh74 | Rh74 | |
| LBV92 | Rh74 F301I | Rh74 F503I | Muscle targeting + |
| | G507R VR8 ColQ | G507R Vr8 RGD | liver de-targeting |
| | Y706C | (P1) Y708C | |

TABLE 4
Study criteria including time, dose, and n

| | Test | | | Dose | Timepoint | n |
|---|---|---|---|---|---|---|
| Group | substance | Serotype | Strain | (vg) | (wks) | 4 |
| 1 | VP00148 | AAV9 | FVB | 1E12 | 2 | 4 |
| 2 | VP00074 | LBV55 | FVB | 1E12 | 2 | 4 |
| 3 | VP00218 | LBV91 | FVB | 1E12 | 2 | 4 |
| 4 | VP00217 | Rh74 | FVB | 1E12 | 2 | 4 |
| 5 | VP00219 | LBV92 | FVB | 1E12 | 2 | 4 |
| 6 | Vehicle | | FVB | n/a | 2 | 3 |

[0195] LBV91 showed near complete liver de-targeting, but muscle transduction was also reduced relative to LBV55. LBV92 showed maintained or enhanced muscle transduction and liver de-targeting (less than 1% of Rh74 or AAV9). FIG. 9. LBV92 therefore achieves: 1) Increases in muscle transduction (Quadricep (quad), tibialis anterior (TA), and diaphragm); 2) greater than 2 order of magnitude decrease in liver transduction; and 3) no increased transduction in other organs.

The application's sequence listing, which the Patent Office published only in electronic form, follows.

SEQUENCE LISTING (322 sequences)

SEQ ID NO: 1 - protein, 738 aa, Artificial Sequence
  LBV10
MAADGYLPDWLEDNLSEGIREWWDLKPGAPKPKANQQKQDNGRGLVLPGYKYLGPFNGLDKGEPVNAADAAALEHDKAYDQQLQAGDNPYLRYNHADAEFQERLQEDTSFGGNLGRAVFQAKKRVLEPLGLVESPVKTAPGKKRPVEPSPQRSPDSSTGIGKKGQQPAKKRLNFGQTGDSESVPDPQPIGEPPAGPSGLGSGTMAAGGGAPMADNNEGADGVGSSSGNWHCDSTWLGDRVITTSTRTWALPTYNNHLYKQISNGTSGGSTNDNTYFGYSTPWGYFDFNRFHCHFSPRDWQRLINNNWGFRPKRLNFKLFNIQVKEVTQNEGTKTIANNLTSTIQVFTDSEYQLPYVLGSAHQGCLPPFPADVFMIPQYGYLTLNNGSQAVGRSSFYCLEYFPSQMLRTGNNFEFSYNFEDVPFHSSYAHSQSLDRLMNPLIDQYLYYLSRTQSTGGTAGTQQLLFSQAGPNNMSAQAKNWLPGPCYRQQRVSTTLSQNNNSNFAATGATKYHLNGRDSLVNPGVAMATHKDDEERFFPSSGVLMFGKQGAGKDNVDYSSVMLTSEEEIKTTNPVATEQYGVVADNLQQQNAAPIVGAVNSQGALPGMVWQNRDVYLQGPIWAKIPHTDGNFHPSPLMGGFGLKHPPPQILIKNTPVPADPPTTFNQAKLASFITQYSTGQVSVEIEWELQKENSKRWNPEIQYTSNYYKSTNVDFAVNTEGTYSEPRPIGTRYLTRNL

SEQ ID NO: 2 - protein, 736 aa, Artificial Sequence
  LBV9
MAADGYLPDWLEDNLSEGIREWWDLKPGAPKPKANQQKQDDGRGLVLPGYKYLGPFNGLDKGEPVNAADAAALEHDKAYDQQLKAGDNPYLRYNHADAEFQERLQEDTSFGGNLGRAVFQAKKRVLEPLGLVEEGAKTAPGKKRPVEQSPQEPDSSSGIGKTGQQPAKKRLNFGQTGDSESVPDPQPLGEPPAAPSGLGPNTMASGGGAPMADNNEGADGVGNSSGNWHCDSTWLGDRVITTSTRTWALPTYNNHLYKQISNGTSGGSTNDNTYFGYSTPWGYFDFNRFHCHFSPRDWQRLINNNWGFRPKRLNFKLFNIQVKEVTTNEGTKTIANNLTSTVQVFTDSEYQLPYVLGSAHQGCLPPFPADVFMVPQYGYLTLNNGSQALGRSSFYCLEYFPSQMLRTGNNFQFSYTFEDVPFHSSYAHSQSLDRLMNPLIDQYLYYLVRTQTTGTGGTQTLAFSQAGPSSMANQARNWVPGPCYRQQRVSTTTNQNNNSNFAATGAAKFKLNGRDSLMNPGVAMASHKDDDDRFFPSSGVLIFGKQGAGNDGVDYSQVLITDEEEIKATNPVATEEYGAVAINNQAANTQAQTGLVHNQGVIPGMVWQNRDVYLQGPIWAKIPHTDGNFHPSPLMGGFGLKHPPPQILIKNTPVPADPPLTFNQAKLNSFITQYSTGQVSVEIEWELQKENSKRWNPEIQYTSNYYKSTNVDFAVNTEGVYSEPRPIGTRYLTRNL

SEQ ID NO: 3 - protein, 736 aa, Artificial Sequence
  LBV11
MAADGYLPDWLEDNLSEGIREWWALKPGAPQPKANQQHQDNARGLVLPGYKYLGPGNGLDKGEPVNAADAAALEHDKAYDQQLKAGDNPYLKYNHADAEFQERLKEDTSFGGNLGRAVFQAKKRLLEPLGLVEEAAKTAPGKKRPVEQSPQEPDSSAGIGKSGAQPAKKRLNFGQTGDTESVPDPQPIGEPPAAPSGVGSLTMAAGGGAPMADNNEGADGVGNSSGNWHCDSTWLGDRVITTSTRTWALPTYNNHLYKQISNGTSGGSTNDNTYFGYSTPWGYFDFNRFHCHFSPRDWQRLINNNWGFRPKRLNFKLFNIQVKEVTTNEGTKTIANNLTSTVQVFTDSEYQLPYVLGSAHQGCLPPFPADVFMVPQYGYLTLNNGSQALGRSSFYCLEYFPSQMLRTGNNFQFSYTFEDVPFHSSYAHSQSLDRLMNPLIDQYLYYLVRTQTTGTGGTQTLAFSQAGPSSMANQARNWVPGPCYRQQRVSTTTNQNNNSNFAWTGAAKFKLNGRDSLMNPGVAMASHKDDDDRFFPSSGVLIFGKQGAGNDGVDYSQVLITDEEEIKATNPVATEEYGAVAINNQAANTQAQTGLVHNQGVIPGMVWQNRDVYLQGPIWAKIPHTDGNFHPSPLMGGFGLKHPPPQILIKNTPVPADPPLTFNQAKLNSFITQYSTGQVSVEIEWELQKENSKRWNPEIQYTSNYYKSTNVDFAVNTEGVYSEPRPIGTRYLTRNL

SEQ ID NO: 4 - protein, 737 aa, Artificial Sequence
  LBV12
MAADGYLPDWLEDNLSEGIREWWALKPGAPKPKANQQKQDDGRGLVLPGYKYLGPFNGLDKGEPVNAADAAALEHDKAYDQQLQAGDNPYLRYNHADAEFQERLQEDTSFGGNLGRAVFQAKKRVLEPLGLVEEGAKTAPGKKRPVEPSPQRSPDSSTGIGKKGQQPARKRLNFGQTGDSESVPDPQPLGEPPAAPSGVGPNTMAAGGGAPMADNNEGADGVGNSSGNWHCDSTWLGDRVITTSTRTWALPTYNNHLYKQISNGTSGGSTNDNTYFGYSTPWGYFDFNRFHCHFSPRDWQRLINNNWGFRPKRLNFKLFNIQVKEVTTNEGTKTIANNLTSTVQVFTDSEYQLPYVLGSAHQGCLPPFPADVFMVPQYGYLTLNNGSQALGRSSFYCLEYFPSQMLRTGNNFQFSYTFEDVPFHSSYAHSQSLDRLMNPLIDQYLYYLVRTQTTGTGGTQTLAFSQAGPSSMANQARNWVPGPCYRQQRVSTTTNQNNNSNFAWTGAAKFKLNGRDSLMNPGVAMASHKDDDDRFFPSSGVLIFGKQGAGNDGVDYSQVLITDEEEIKATNPVATEEYGAVAINNQAANTQAQTGLVHNQGVIPGMVWQNRDVYLQGPIWAKIPHTDGNFHPSPLMGGFGLKHPPPQILIKNTPVPADPPLTFNQAKLNSFITQYSTGQVSVEIEWELQKENSKRWNPEIQYTSNYYKSTNVDFAVNTEGVYSEPRPIGTRYLTRNL

SEQ ID NO: 5 - protein, 736 aa, Artificial Sequence
  LBV13
MAADGYLPDWLEDNLSEGIREWWDLKPGAPKPKANQQKQDDGRGLVLPGYKYLGPFNGLDKGEPVNAADAAALEHDKAYDQQLKAGDNPYLRYNHADAEFQERLQEDTSFGGNLGRAVFQAKKRVLEPLGLVEEGAKTAPGKKRPVEQSPQEPDSSSGIGKTGQQPAKKRLNFGQTGDSESVPDPQPLGEPPATPAAVGPTTMAAGGGAPMADNNEGADGVGNSSGNWHCDSTWLGDRVITTSTRTWALPTYNNHLYKQISNGTSGGSTNDNTYFGYSTPWGYFDFNRFHCHFSPRDWQRLINNNWGFRPKRLNFKLFNIQVKEVTTNEGTKTIANNLTSTVQVFTDSEYQLPYVLGSAHQGCLPPFPADVFMVPQYGYLTLNNGSQALGRSSFYCLEYFPSQMLRTGNNFQFSYTFEDVPFHSSYAHSQSLDRLMNPLIDQYLYYLVRTQTTGTGGTQTLAFSQAGPSSMANQARNWVPGPCYRQQRVSTTTNQNNNSNFAWTGAAKFKLNGRDSLMNPGVAMASHKDDDDRFFPSSGVLIFGKQGAGNDGVDYSQVLITDEEEIKATNPVATEEYGAVAINNQAANTQAQTGLVHNQGVIPGMVWQNRDVYLQGPIWAKIPHTDGNFHPSPLMGGFGLKHPPPQILIKNTPVPADPPLTFNQAKLNSFITQYSTGQVSVEIEWELQKENSKRWNPEIQYTSNYYKSTNVDFAVNTEGVYSEPRPIGTRYLTRNL

SEQ ID NO: 6 - protein, 737 aa, Artificial Sequence
  LBV14
MAADGYLPDWLEDNLSEGIREWWDLKPGAPKPKANQQKQDNGRGLVLPGYKYLGPFNGLDKGEPVNAADAAALEHDKAYDQQLKAGDNPYLRYNHADAEFQERLQEDTSFGGNLGRAVFQAKKRVLEPLGLVEEGAKTAPAKKRPVEPSPQRSPDSSTGIGKKGQQPARKRLNFGQTGDSESVPDPQPLGEPPAAPSSVGSGTMAAGGGAPMADNNEGADGVGNSSGNWHCDSTWLGDRVITTSTRTWALPTYNNHLYKQISNGTSGGSTNDNTYFGYSTPWGYFDFNRFHCHFSPRDWQRLINNNWGFRPKRLNFKLFNIQVKEVTTNEGTKTIANNLTSTVQVFTDSEYQLPYVLGSAHQGCLPPFPADVFMVPQYGYLTLNNGSQALGRSSFYCLEYFPSQMLRTGNNFQFSYTFEDVPFHSSYAHSQSLDRLMNPLIDQYLYYLVRTQTTGTGGTQTLAFSQAGPSSMANQARNWVPGPCYRQQRVSTTTNQNNNSNFAWTGAAKFKLNGRDSLMNPGVAMASHKDDDDRFFPSSGVLIFGKQGAGNDGVDYSQVLITDEEEIKATNPVATEEYGAVAINNQAANTQAQTGLVHNQGVIPGMVWQNRDVYLQGPIWAKIPHTDGNFHPSPLMGGFGLKHPPPQILIKNTPVPADPPLTFNQAKLNSFITQYSTGQVSVEIEWELQKENSKRWNPEIQYTSNYYKSTNVDFAVNTEGVYSEPRPIGTRYLTRNL

SEQ ID NO: 7 - protein, 737 aa, Artificial Sequence
  LBV15
MAADGYLPDWLEDNLSEGIREWWALKPGAPQPKANQQHQDNARGLVLPGYKYLGPGNGLDKGEPVNAADAAALEHDKAYDQQLKAGDNPYLKYNHADAEFQERLKEDTSFGGNLGRAVFQAKKRLLEPLGLVEEAAKTAPGKKRPVEQSPQEPDSSAGIGKSGAQPAKKRLNFGQTGDTESVPDPQPIGEPPAAPSGVGSLTMAAGGGAPMADNNEGADGVGSSSGNWHCDSTWLGDRVITTSTRTWALPTYNNHLYKQISNGTSGGSTNDNTYFGYSTPWGYFDFNRFHCHFSPRDWQRLINNNWGFRPKRLNFKLFNIQVKEVTQNEGTKTIANNLTSTIQVFTDSEYQLPYVLGSAHQGCLPPFPADVFMIPQYGYLTLNNGSQAVGRSSFYCLEYFPSQMLRTGNNFEFSYNFEDVPFHSSYAHSQSLDRLMNPLIDQYLYYLSRTQSTGGTAGTQQLLFSQAGPNNMSAQAKNWLPGPCYRQQRVSTTLSQNNNSNFAWTGATKYHLNGRDSLVNPGVAMATHKDDEERFFPSSGVLMFGKQGAGKDNVDYSSVMLTSEEEIKTTNPVATEQYGVVADNLQQQNAAPIVGAVNSQGALPGMVWQNRDVYLQGPIWAKIPHTDGNFHPSPLMGGFGLKHPPPQILIKNTPVPADPPTTFNQAKLASFITQYSTGQVSVEIEWELQKENSKRWNPEIQYTSNYYKSTNVDFAVNTEGTYSEPRPIGTRYLTRNL

SEQ ID NO: 8 - protein, 737 aa, Artificial Sequence
  LBV16
MAADGYLPDWLEDNLSEGIREWWDLKPGAPKPKANQQKQDDGRGLVLPGYKYLGPFNGLDKGEPVNAADAAALEHDKAYDQQLKAGDNPYLRYNHADAEFQERLQEDTSFGGNLGRAVFQAKKRVLEPLGLVEEGAKTAPGKKRPVEQSPQEPDSSSGIGKTGQQPAKKRLNFGQTGDSESVPDPQPLGEPPATPAAVGPTTMAAGGGAPMADNNEGADGVGSSSGNWHCDSTWLGDRVITTSTRTWALPTYNNHLYKQISNGTSGGSTNDNTYFGYSTPWGYFDFNRFHCHFSPRDWQRLINNNWGFRPKRLNFKLFNIQVKEVTQNEGTKTIANNLTSTIQVFTDSEYQLPYVLGSAHQGCLPPFPADVFMIPQYGYLTLNNGSQAVGRSSFYCLEYFPSQMLRTGNNFEFSYNFEDVPFHSSYAHSQSLDRLMNPLIDQYLYYLSRTQSTGGTAGTQQLLFSQAGPNNMSAQAKNWLPGPCYRQQRVSTTLSQNNNSNFAWTGATKYHLNGRDSLVNPGVAMATHKDDEERFFPSSGVLMFGKQGAGKDNVDYSSVMLTSEEEIKTTNPVATEQYGVVADNLQQQNAAPIVGAVNSQGALPGMVWQNRDVYLQGPIWAKIPHTDGNFHPSPLMGGFGLKHPPPQILIKNTPVPADPPTTFNQAKLASFITQYSTGQVSVEIEWELQKENSKRWNPEIQYTSNYYKSTNVDFAVNTEGTYSEPRPIGTRYLTRNL

SEQ ID NO: 9 - protein, 738 aa, Artificial Sequence
  LBV17
MAADGYLPDWLEDNLSEGIREWWDLKPGAPKPKANQQKQDNGRGLVLPGYKYLGPFNGLDKGEPVNAADAAALEHDKAYDQQLKAGDNPYLRYNHADAEFQERLQEDTSFGGNLGRAVFQAKKRVLEPLGLVEEGAKTAPAKKRPVEPSPQRSPDSSTGIGKKGQQPARKRLNFGQTGDSESVPDPQPLGEPPAAPSSVGSGTMAAGGGAPMADNNEGADGVGSSSGNWHCDSTWLGDRVITTSTRTWALPTYNNHLYKQISNGTSGGSTNDNTYFGYSTPWGYFDFNRFHCHFSPRDWQRLINNNWGFRPKRLNFKLFNIQVKEVTQNEGTKTIANNLTSTIQVFTDSEYQLPYVLGSAHQGCLPPFPADVFMIPQYGYLTLNNGSQAVGRSSFYCLEYFPSQMLRTGNNFEFSYNFEDVPFHSSYAHSQSLDRLMNPLIDQYLYYLSRTQSTGGTAGTQQLLFSQAGPNNMSAQAKNWLPGPCYRQQRVSTTLSQNNNSNFAWTGATKYHLNGRDSLVNPGVAMATHKDDEERFFPSSGVLMFGKQGAGKDNVDYSSVMLTSEEEIKTTNPVATEQYGVVADNLQQQNAAPIVGAVNSQGALPGMVWQNRDVYLQGPIWAKIPHTDGNFHPSPLMGGFGLKHPPPQILIKNTPVPADPPTTFNQAKLASFITQYSTGQVSVEIEWELQKENSKRWNPEIQYTSNYYKSTNVDFAVNTEGTYSEPRPIGTRYLTRNL

SEQ ID NO: 10 - protein, 749 aa, Artificial Sequence
  Rh74 RGD insertion
MAADGYLPDWLEDNLSEGIREWWDLKPGAPKPKANQQKQDNGRGLVLPGYKYLGPFNGLDKGEPVNAADAAALEHDKAYDQQLQAGDNPYLRYNHADAEFQERLQEDTSFGGNLGRAVFQAKKRVLEPLGLVESPVKTAPGKKRPVEPSPQRSPDSSTGIGKKGQQPAKKRLNFGQTGDSESVPDPQPIGEPPAGPSGLGSGTMAAGGGAPMADNNEGADGVGSSSGNWHCDSTWLGDRVITTSTRTWALPTYNNHLYKQISNGTSGGSTNDNTYFGYSTPWGYFDFNRFHCHFSPRDWQRLINNNWGFRPKRLNFKLFNIQVKEVTQNEGTKTIANNLTSTIQVFTDSEYQLPYVLGSAHQGCLPPFPADVFMIPQYGYLTLNNGSQAVGRSSFYCLEYFPSQMLRTGNNFEFSYNFEDVPFHSSYAHSQSLDRLMNPLIDQYLYYLSRTQSTGGTAGTQQLLFSQAGPNNMSAQAKNWLPGPCYRQQRVSTTLSQNNNSNFAWTGATKYHLNGRDSLVNPGVAMATHKDDEERFFPSSGVLMFGKQGAGKDNVDYSSVMLTSEEEIKTTNPVATEQYGVVADNLQQQGSGRGDLGLSGGAAPIVGAVNSQGALPGMVWQNRDVYLQGPIWAKIPHTDGNFHPSPLMGGFGLKHPPPQILIKNTPVPADPPTTFNQAKLASFITQYSTGQVSVEIEWELQKENSKRWNPEIQYTSNYYKSTNVDFAVNTEGTYSEPRPIGTRYLTRNL

SEQ ID NO: 11 - protein, 747 aa, Artificial Sequence
  Rh8 RGD insertion
MAADGYLPDWLEDNLSEGIREWWDLKPGAPKPKANQQKQDDGRGLVLPGYKYLGPFNGLDKGEPVNAADAAALEHDKAYDQQLKAGDNPYLRYNHADAEFQERLQEDTSFGGNLGRAVFQAKKRVLEPLGLVEEGAKTAPGKKRPVEQSPQEPDSSSGIGKTGQQPAKKRLNFGQTGDSESVPDPQPLGEPPAAPSGLGPNTMASGGGAPMADNNEGADGVGNSSGNWHCDSTWLGDRVITTSTRTWALPTYNNHLYKQISNGTSGGSTNDNTYFGYSTPWGYFDFNRFHCHFSPRDWQRLINNNWGFRPKRLNFKLFNIQVKEVTTNEGTKTIANNLTSTVQVFTDSEYQLPYVLGSAHQGCLPPFPADVFMVPQYGYLTLNNGSQALGRSSFYCLEYFPSQMLRTGNNFQFSYTFEDVPFHSSYAHSQSLDRLMNPLIDQYLYYLVRTQTTGTGGTQTLAFSQAGPSSMANQARNWVPGPCYRQQRVSTTTNQNNNSNFAWTGAAKFKLNGRDSLMNPGVAMASHKDDDDRFFPSSGVLIFGKQGAGNDGVDYSQVLITDEEEIKATNPVATEEYGAVAINNQAANTGSGRGDLGLSGGAQTGLVHNQGVIPGMVWQNRDVYLQGPIWAKIPHTDGNFHPSPLMGGFGLKHPPPQILIKNTPVPADPPLTFNQAKLNSFITQYSTGQVSVEIEWELQKENSKRWNPEIQYTSNYYKSTNVDFAVNTEGVYSEPRPIGTRYLTRNL

SEQ ID NO: 12 - protein, 619 aa, Artificial Sequence
  Rh74 S371-VP2 (VP1 and VP3 wildtype Rh74)
MGSLDESFYDWFERQLGGGAPGKKRPVEPSPQRSPDSSTGIGKKGQQPAKKRLNFGQTGDSESVPDPQPIGEPPAGPSGLGSGTMAAGGGAPMADNNEGADGVGSSSGNWHCDSTWLGDRVITTSTRTWALPTYNNHLYKQISNGTSGGSTNDNTYFGYSTPWGYFDFNRFHCHFSPRDWQRLINNNWGFRPKRLNFKLFNIQVKEVTQNEGTKTIANNLTSTIQVFTDSEYQLPYVLGSAHQGCLPPFPADVFMIPQYGYLTLNNGSQAVGRSSFYCLEYFPSQMLRTGNNFEFSYNFEDVPFHSSYAHSQSLDRLMNPLIDQYLYYLSRTQSTGGTAGTQQLLFSQAGPNNMSAQAKNWLPGPCYRQQRVSTTLSQNNNSNFAWTGATKYHLNGRDSLVNPGVAMATHKDDEERFFPSSGVLMFGKQGAGKDNVDYSSVMLTSEEEIKTTNPVATEQYGVVADNLQQQNAAPIVGAVNSQGALPGMVWQNRDVYLQGPIWAKIPHTDGNFHPSPLMGGFGLKHPPPQILIKNTPVPADPPTTFNQAKLASFITQYSTGQVSVEIEWELQKENSKRWNPEIQYTSNYYKSTNVDFAVNTEGTYSEPRPIGTRYLTRNL

SEQ ID NO: 13 - protein, 639 aa, Artificial Sequence
  Rh74 S519-VP2 (VP1 and VP3 wildtype Rh74)
MSLEEEWAQVECEVYGRGCPSGSLDESFYDWFERQLGGGAPGKKRPVEPSPQRSPDSSTGIGKKGQQPAKKRLNFGQTGDSESVPDPQPIGEPPAGPSGLGSGTMAAGGGAPMADNNEGADGVGSSSGNWHCDSTWLGDRVITTSTRTWALPTYNNHLYKQISNGTSGGSTNDNTYFGYSTPWGYFDFNRFHCHFSPRDWQRLINNNWGFRPKRLNFKLFNIQVKEVTQNEGTKTIANNLTSTIQVFTDSEYQLPYVLGSAHQGCLPPFPADVFMIPQYGYLTLNNGSQAVGRSSFYCLEYFPSQMLRTGNNFEFSYNFEDVPFHSSYAHSQSLDRLMNPLIDQYLYYLSRTQSTGGTAGTQQLLFSQAGPNNMSAQAKNWLPGPCYRQQRVSTTLSQNNNSNFAWTGATKYHLNGRDSLVNPGVAMATHKDDEERFFPSSGVLMFGKQGAGKDNVDYSSVMLTSEEEIKTTNPVATEQYGVVADNLQQQNAAPIVGAVNSQGALPGMVWQNRDVYLQGPIWAKIPHTDGNFHPSPLMGGFGLKHPPPQILIKNTPVPADPPTTFNQAKLASFITQYSTGQVSVEIEWELQKENSKRWNPEIQYTSNYYKSTNVDFAVNTEGTYSEPRPIGTRYLTRNL

SEQ ID NO: 14 - protein, 646 aa, Artificial Sequence
  Rh74 S961-VP2 (VP1 and VP3 wildtype Rh74)
MGSLDESFYDWFERQLGGGSGGSSLEEEWAQIQCEVWGRGCPSYGGAPGKKRPVEPSPQRSPDSSTGIGKKGQQPAKKRLNFGQTGDSESVPDPQPIGEPPAGPSGLGSGTMAAGGGAPMADNNEGADGVGSSSGNWHCDSTWLGDRVITTSTRTWALPTYNNHLYKQISNGTSGGSTNDNTYFGYSTPWGYFDFNRFHCHFSPRDWQRLINNNWGFRPKRLNFKLFNIQVKEVTQNEGTKTIANNLTSTIQVFTDSEYQLPYVLGSAHQGCLPPFPADVFMIPQYGYLTLNNGSQAVGRSSFYCLEYFPSQMLRTGNNFEFSYNFEDVPFHSSYAHSQSLDRLMNPLIDQYLYYLSRTQSTGGTAGTQQLLFSQAGPNNMSAQAKNWLPGPCYRQQRVSTTLSQNNNSNFAWTGATKYHLNGRDSLVNPGVAMATHKDDEERFFPSSGVLMFGKQGAGKDNVDYSSVMLTSEEEIKTTNPVATEQYGVVADNLQQQNAAPIVGAVNSQGALPGMVWQNRDVYLQGPIWAKIPHTDGNFHPSPLMGGFGLKHPPPQILIKNTPVPADPPTTFNQAKLASFITQYSTGQVSVEIEWELQKENSKRWNPEIQYTSNYYKSTNVDFAVNTEGTYSEPRPIGTRYLTRNL

SEQ ID NO: 15 - protein, 803 aa, Artificial Sequence
  Rh74 VP1 S519 (VP2 and VP3 wildtype Rh74)
MAADGYLPDWLEDNLSEGIREWWDLKPGAPKPKANQQKQDNGRGLVLPGYKYLGPFNGLDKGEPVNAADAAALEHDKAYDQQLQAGDNPYLRYNHADAEFQERLQEDTSFGGNLGRAVFQAKKRVLEPLGLVESPVKTAPGKKRPVEPSPQRSPDSSTGIGKKGQQPAKKRLNFGQTGDSESVPDPQPIGEPPAGPSGLGSGTMAAGGGAPMADNNEGADGVGSSSGNWHCDSTWLGDRVITTSTRTWALPTYNNHLYKQISNGTSGGSTNDNTYFGYSTPWGYFDFNRFHCHFSPRDWQRLINNNWGFRPKRLNFKLFNIQVKEVTQNEGTKTIANNLTSTIQVFTDSEYQLPYVLGSAHQGCLPPFPADVFMIPQYGYLTLNNGSQAVGRSSFYCLEYFPSQMLRTGNNFEFSYNFEDVPFHSSYAHSQSLDRLMNPLIDQYLYYLSRTQSTGGTAGTQQLLFSQAGPNNMSAQAKNWLPGPCYRQQRVSTTLSQNNNSNFAWTGATKYHLNGRDSLVNPGVAMATHKDDEERFFPSSGVLMFGKQGAGKDNVDYSSVMLTSEEEIKTTNPVATEQYGVVADNLQQQGGGGSGGGGSGGGGSGGGGSGGGGSSLEEEWAQVECEVYGRGCPSGSLDESFYDWFERQLGGGGANAAPIVGAVNSQGALPGMVWQNRDVYLQGPIWAKIPHTDGNFHPSPLMGGFGLKHPPPQILIKNTPVPADPPTTFNQAKLASFITQYSTGQVSVEIEWELQKENSKRWNPEIQYTSNYYKSTNVDFAVNTEGTYSEPRPIGTRYLTRNL

SEQ ID NO: 16 - protein, 811 aa, Artificial Sequence
  Rh74 VP1 S961 (VP2 and VP3 wildtype Rh74)
MAADGYLPDWLEDNLSEGIREWWDLKPGAPKPKANQQKQDNGRGLVLPGYKYLGPFNGLDKGEPVNAADAAALEHDKAYDQQLQAGDNPYLRYNHADAEFQERLQEDTSFGGNLGRAVFQAKKRVLEPLGLVESPVKTAPGKKRPVEPSPQRSPDSSTGIGKKGQQPAKKRLNFGQTGDSESVPDPQPIGEPPAGPSGLGSGTMAAGGGAPMADNNEGADGVGSSSGNWHCDSTWLGDRVITTSTRTWALPTYNNHLYKQISNGTSGGSTNDNTYFGYSTPWGYFDFNRFHCHFSPRDWQRLINNNWGFRPKRLNFKLFNIQVKEVTQNEGTKTIANNLTSTIQVFTDSEYQLPYVLGSAHQGCLPPFPADVFMIPQYGYLTLNNGSQAVGRSSFYCLEYFPSQMLRTGNNFEFSYNFEDVPFHSSYAHSQSLDRLMNPLIDQYLYYLSRTQSTGGTAGTQQLLFSQAGPNNMSAQAKNWLPGPCYRQQRVSTTLSQNNNSNFAWTGATKYHLNGRDSLVNPGVAMATHKDDEERFFPSSGVLMFGKQGAGKDNVDYSSVMLTSEEEIKTTNPVATEQYGVVADNLQQQGGGGSGGGGSGGGGSGGGGSGGGGSGSLDESFYDWFERQLGGGSGGSSLEEEWAQIQCEVWGRGCPSYGGGGANAAPIVGAVNSQGALPGMVWQNRDVYLQGPIWAKIPHTDGNFHPSPLMGGFGLKHPPPQILIKNTPVPADPPTTFNQAKLASFITQYSTGQVSVEIEWELQKENSKRWNPEIQYTSNYYKSTNVDFAVNTEGTYSEPRPIGTRYLTRNL

SEQ ID NO: 17 - protein, 886 aa, Artificial Sequence
  Rh74 VP1 MuSK VHH (VP2 and VP3 wildtype Rh74)
MAADGYLPDWLEDNLSEGIREWWDLKPGAPKPKANQQKQDNGRGLVLPGYKYLGPFNGLDKGEPVNAADAAALEHDKAYDQQLQAGDNPYLRYNHADAEFQERLQEDTSFGGNLGRAVFQAKKRVLEPLGLVESPVKTAPGKKRPVEPSPQRSPDSSTGIGKKGQQPAKKRLNFGQTGDSESVPDPQPIGEPPAGPSGLGSGTMAAGGGAPMADNNEGADGVGSSSGNWHCDSTWLGDRVITTSTRTWALPTYNNHLYKQISNGTSGGSTNDNTYFGYSTPWGYFDFNRFHCHFSPRDWQRLINNNWGFRPKRLNFKLFNIQVKEVTQNEGTKTIANNLTSTIQVFTDSEYQLPYVLGSAHQGCLPPFPADVFMIPQYGYLTLNNGSQAVGRSSFYCLEYFPSQMLRTGNNFEFSYNFEDVPFHSSYAHSQSLDRLMNPLIDQYLYYLSRTQSTGGTAGTQQLLFSQAGPNNMSAQAKNWLPGPCYRQQRVSTTLSQNNNSNFAWTGATKYHLNGRDSLVNPGVAMATHKDDEERFFPSSGVLMFGKQGAGKDNVDYSSVMLTSEEEIKTTNPVATEQYGVVADNLQQQGGGGSGGGGSGGGGSGGGGSGGGGSEVQLQASGGGFVQAGGSLRLSCAVSGITLRTYGMHWVRQAPGKEREFVAGISFDGRSEYYADSVQGRFTISRDNAKNTVYLQMNSLKPEDTATYYCARGAHYGFDIYWGQGTQVTVSSGGGGANAAPIVGAVNSQGALPGMVWQNRDVYLQGPIWAKIPHTDGNFHPSPLMGGFGLKHPPPQILIKNTPVPADPPTTFNQAKLASFITQYSTGQVSVEIEWELQKENSKRWNPEIQYTSNYYKSTNVDFAVNTEGTYSEPRPIGTRYLTRNL

SEQ ID NO: 18 - DNA, 2217 bp, Artificial Sequence
  LBV10
atggctgccgatggttatcttccagattggctcgaggacaacctctctgagggcattcgcgagtggtgggacttgaaacctggagccccgaaacccaaagccaaccagcaaaagcaggacaacggccggggtctggtgcttcctggctacaagtacctcggacccttcaacggactcgacaagggggagcccgtcaacgcggcggacgcagcggccctcgagcacgacaaggcctacgaccagcagctccaagcgggtgacaatccgtacctgcggtataaccacgccgacgccgagtttcaggagcgtctgcaagaagatacgtcttttgggggcaacctcgggcgagcagtcttccaggccaagaagcgggttctcgaacctctcggtctggttgagtctcctgtgaagacggctcctggaaagaagagaccggtagagccatcaccccagcgttctccagactcctctacgggcatcggcaagaaaggccagcagcccgcgaaaaagagactcaactttgggcagactggcgactcagagtcagtgcccgaccctcaaccaatcggagaaccccccgcaggcccctctggtctgggatctggtacaatggctgcaggcggtggcgctccaatggcagacaataacgaaggcgccgacggagtgggtagttcctcaggaaattggcattgcgattccacatggctgggcgacagagtcatcaccaccagcacccgaacctgggccctccccacctacaacaaccacctctacaagcaaatctccaacgggacttcgggaggaagcaccaacgacaacacctacttcggctacagcaccccctgggggtattttgactttaacagattccactgccacttctcaccacgtgactggcagcgactcatcaacaacaactggggattccggcccaagagactcaacttcaagctcttcaacatccaggtcaaggaggtcacgcagaatgaaggcaccaagaccatcgccaataaccttaccagcacgattcaggtctttacggactcggaataccagctcccgtacgtcctcggctctgcgcaccagggctgcctgcctccgttcccggcggacgtcttcatgattcctcagtacgggtacctgactctgaacaatggcagtcaggccgtgggccgttcctccttctactgcctggagtactttccttctcaaatgctgagaacgggcaacaactttgagttcagctacaactttgaggacgtgccttttcacagcagctacgcgcacagccaaagcctggaccggctgatgaaccccctcatcgaccagtacctgtactacctgtctcggactcagtccacgggaggtaccgcaggaactcagcagttgctattttctcaggccgggcctaataacatgtcggctcaggccaaaaactggctacccgggccctgctaccggcagcaacgcgtctccacgacactgtcgcaaaataacaacagcaactttgccgcgaccggtgccaccaagtatcatctgaatggcagagactctctggtaaatcccggtgtcgctatggcaacccacaaggacgacgaagagcgattttttccgtccagcggagtcttaatgtttgggaaacagggagctggaaaagacaacgtggactatagcagcgttatgctaaccagtgaggaagaaattaaaaccaccaacccagtggccacagaacagtacggcgtggtggccgataacctgcaacagcaaaacgccgctcctattgtaggggccgtcaacagtcaaggagccttacctggcatggtctggcagaaccgggacgtgtacctgcagggtcctatctgggccaagattcctcacacggacggaaactttcatccctcgccgctgatgggaggctttggactgaaacacccgcctcctcagatcctgattaagaatacacctgttcccgcggatcctccaactaccttcaaccaagctaagctggcgtcgttcatcacgcagtacagcaccggacaggtcagcgtggaaattgaatgggagctgcagaaagaaaacagcaaacgctggaacccagagattcaatacacttccaactactacaaatctacaaatgtggactttgctgttaacacagagggcacttattctgagcctcgccccatcggcacccgttacctcacccgtaatctgtaa

SEQ ID NO: 19 - DNA, 2211 bp, Artificial Sequence
  LBV9
atggctgccgatggttatcttccagattggctcgaggacaacctctctgagggcattcgcgagtggtgggacttgaaacctggagccccgaaacccaaagccaaccagcaaaagcaggacgacggccggggtctggtgcttcctggctacaagtacctcggacccttcaacggactcgacaagggggagcccgtcaacgcggcggacgcagcggccctcgagcacgacaaagcctacgaccagcagctcaaagcgggtgacaatccgtacctgcggtataatcacgccgacgccgagtttcaggagcgtctgcaagaagatacgtcttttgggggcaacctcgggcgagcagtcttccaggccaagaagcgggttctcgaacctctcggtctggttgaggaaggcgctaagacggctcctggaaagaagagaccggtagagcagtcgccacaagagccagactcctcctcgggcatcggcaagacaggccagcagcccgctaaaaagagactcaattttggtcagactggcgactcagagtcagtccccgacccacaacctctcggagaacctccagcagccccctcaggtctgggacctaatacaatggcttcaggcggtggcgctccaatggcagacaataacgaaggcgccgacggagtgggtaattcctcgggaaattggcattgcgattccacatggctgggggacagagtcatcaccaccagcacccgaacctgggccctgcccacctacaacaaccacctctacaagcaaatctccaacggcacctcgggaggaagcaccaacgacaacacctattttggctacagcaccccctgggggtattttgacttcaacagattccactgtcacttttcaccacgtgactggcaacgactcatcaacaacaattggggattccggcccaaaagactcaacttcaagctgttcaacatccaggtcaaggaagtcacgacgaacgaaggcaccaagaccatcgccaataatctcaccagcaccgtgcaggtctttacggactcggagtaccagttaccgtacgtgctaggatccgctcaccagggatgtctgcctccgttcccggcggacgtcttcatggttcctcagtacggctatttaactttaaacaatggaagccaagccctgggacgttcctccttctactgtctggagtatttcccatcgcagatgctgagaaccggcaacaactttcagttcagctacaccttcgaggacgtgcctttccacagcagctacgcgcacagccagagcctggacaggctgatgaatcccctcatcgaccagtacctgtactacctggtcagaacgcaaacgactggaactggagggacgcagactctggcattcagccaagcgggtcctagctcaatggccaaccaggctagaaattgggtgcccggaccttgctaccggcagcagcgcgtctccacgacaaccaaccagaacaacaacagcaactttgccgcgacgggagctgccaagtttaagctgaacggccgagactctctaatgaatccgggcgtggcaatggcttcccacaaggatgacgacgaccgcttcttcccttcgagcggggtcctgatttttggcaagcaaggagccgggaacgatggagtggattacagccaagtgctgattacagatgaggaagaaatcaaggctaccaaccccgtggccacagaagaatatggagcagtggccatcaacaaccaggccgccaatacgcaggcgcagaccggactcgtgcacaaccagggggtgattcccggcatggtgtggcagaatagagacgtgtacctgcagggtcccatctgggccaaaattcctcacacggacggcaactttcacccgtctcccctgatgggcggctttggactgaagcacccgcctcctcaaattctcatcaagaacacaccggttccagcggacccgccgcttaccttcaaccaggccaagctgaactctttcatcacgcagtacagcaccggacaggtcagcgtggaaatcgagtgggagctgcagaaagaaaacagcaaacgctggaatccagagattcaatacacttccaactactacaaatctacaaatgtggactttgctgtcaacacggagggggtttatagcgagcctcgccccattggcacccgttacctcacccgcaacctgtaa

SEQ ID NO: 20 - DNA, 2211 bp, Artificial Sequence
  LBV11
atggctgccgatggttatcttccagattggctcgaggacaaccttagtgaaggaattcgcgagtggtgggctttgaaacctggagcccctcaacccaaggcaaatcaacaacatcaagacaacgctcgaggtcttgtgcttccgggttacaaataccttggacccggcaacggactcgacaagggggagccggtcaacgcagcagacgcggcggccctcgagcacgacaaggcctacgaccagcagctcaaggccggagacaacccgtacctcaagtacaaccacgccgacgccgagttccaggagcggctcaaagaagatacgtcttttgggggcaacctcgggcgagcagtcttccaggccaaaaagaggcttcttgaacctcttggtctggttgaggaagcggctaagacggctcctggaaagaagaggcctgtagagcagtctcctcaggaaccggactcctccgcgggtattggcaaatcgggtgcacagcccgctaaaaagagactcaatttcggtcagactggcgacacagagtcagtcccagaccctcaaccaatcggagaacctcccgcagccccctcaggtgtgggatctcttacaatggctgcaggcggtggcgctccaatggcagacaataacgaaggcgccgacggagtgggtaattcctcgggaaattggcattgcgattccacatggctgggggacagagtcatcaccaccagcacccgaacctgggccctgcccacctacaacaaccacctctacaagcaaatctccaacggcacctcgggaggaagcaccaacgacaacacctattttggctacagcaccccctgggggtattttgacttcaacagattccactgtcacttttcaccacgtgactggcaacgactcatcaacaacaattggggattccggcccaaaagactcaacttcaagctgttcaacatccaggtcaaggaagtcacgacgaacgaaggcaccaagaccatcgccaataatctcaccagcaccgtgcaggtctttacggactcggagtaccagttaccgtacgtgctaggatccgctcaccagggatgtctgcctccgttcccggcggacgtcttcatggttcctcagtacggctatttaactttaaacaatggaagccaagccctgggacgttcctccttctactgtctggagtatttcccatcgcagatgctgagaaccggcaacaactttcagttcagctacaccttcgaggacgtgcctttccacagcagctacgcgcacagccagagcctggacaggctgatgaatcccctcatcgaccagtacctgtactacctggtcagaacgcaaacgactggaactggagggacgcagactctggcattcagccaagcgggtcctagctcaatggccaaccaggctagaaattgggtgcccggaccttgctaccggcagcagcgcgtctccacgacaaccaaccagaacaacaacagcaactttgcctggacgggagctgccaagtttaagctgaacggccgagactctctaatgaatccgggcgtggcaatggcttcccacaaggatgacgacgaccgcttcttcccttcgagcggggtcctgatttttggcaagcaaggagccgggaacgatggagtggattacagccaagtgctgattacagatgaggaagaaatcaaggctaccaaccccgtggccacagaagaatatggagcagtggccatcaacaaccaggccgccaatacgcaggcgcagaccggactcgtgcacaaccagggggtgattcccggcatggtgtggcagaatagagacgtgtacctgcagggtcccatctgggccaaaattcctcacacggacggcaactttcacccgtctcccctgatgggcggctttggactgaagcacccgcctcctcaaattctcatcaagaacacaccggttccagcggacccgccgcttaccttcaaccaggccaagctgaactctttcatcacgcagtacagcaccggacaggtcagcgtggaaatcgagtgggagctgcagaaagaaaacagcaaacgctggaatccagagattcaatacacttccaactactacaaatctacaaatgtggactttgctgtcaacacggagggggtttatagcgagcctcgccccattggcacccgttacctcacccgcaacctgtaa

SEQ ID NO: 21 - DNA, 2214 bp, Artificial Sequence
  AAV8 VP1/2 Rh8 VP3
atggctgccgatggttatcttccagattggctcgaggacaacctctctgagggcattcgcgagtggtgggcgctgaaacctggagccccgaagcccaaagccaaccagcaaaagcaggacgacggccggggtctggtgcttcctggctacaagtacctcggacccttcaacggactcgacaagggggagcccgtcaacgcggcggacgcagcggccctcgagcacgacaaggcctacgaccagcagctgcaggcgggtgacaatccgtacctgcggtataaccacgccgacgccgagtttcaggagcgtctgcaagaagatacgtcttttgggggcaacctcgggcgagcagtcttccaggccaagaagcgggttctcgaacctctcggtctggttgaggaaggcgctaagacggctcctggaaagaagagaccggtagagccatcaccccagcgttctccagactcctctacgggcatcggcaagaaaggccaacagcccgccagaaaaagactcaattttggtcagactggcgactcagagtcagttccagaccctcaacctctcggagaacctccagcagcgccctctggtgtgggacctaatacaatggctgcaggcggtggcgctccaatggcagacaataacgaaggcgccgacggagtgggtaattcctcgggaaattggcattgcgattccacatggctgggggacagagtcatcaccaccagcacccgaacctgggccctgcccacctacaacaaccacctctacaagcaaatctccaacggcacctcgggaggaagcaccaacgacaacacctattttggctacagcaccccctgggggtattttgacttcaacagattccactgtcacttttcaccacgtgactggcaacgactcatcaacaacaattggggattccggcccaaaagactcaacttcaagctgttcaacatccaggtcaaggaagtcacgacgaacgaaggcaccaagaccatcgccaataatctcaccagcaccgtgcaggtctttacggactcggagtaccagttaccgtacgtgctaggatccgctcaccagggatgtctgcctccgttcccggcggacgtcttcatggttcctcagtacggctatttaactttaaacaatggaagccaagccctgggacgttcctccttctactgtctggagtatttcccatcgcagatgctgagaaccggcaacaactttcagttcagctacaccttcgaggacgtgcctttccacagcagctacgcgcacagccagagcctggacaggctgatgaatcccctcatcgaccagtacctgtactacctggtcagaacgcaaacgactggaactggagggacgcagactctggcattcagccaagcgggtcctagctcaatggccaaccaggctagaaattgggtgcccggaccttgctaccggcagcagcgcgtctccacgacaaccaaccagaacaacaacagcaactttgcctggacgggagctgccaagtttaagctgaacggccgagactctctaatgaatccgggcgtggcaatggcttcccacaaggatgacgacgaccgcttcttcccttcgagcggggtcctgatttttggcaagcaaggagccgggaacgatggagtggattacagccaagtgctgattacagatgaggaagaaatcaaggctaccaaccccgtggccacagaagaatatggagcagtggccatcaacaaccaggccgccaatacgcaggcgcagaccggactcgtgcacaaccagggggtgattcccggcatggtgtggcagaatagagacgtgtacctgcagggtcccatctgggccaaaattcctcacacggacggcaactttcacccgtctcccctgatgggcggctttggactgaagcacccgcctcctcaaattctcatcaagaacacaccggttccagcggacccgccgcttaccttcaaccaggccaagctgaactctttcatcacgcagtacagcaccggacaggtcagcgtggaaatcgagtgggagctgcagaaagaaaacagcaaacgctggaatccagagattcaatacacttccaactactacaaatctacaaatgtggactttgctgtcaacacggagggggtttatagcgagcctcgccccattggcacccgttacctcacccgcaacctgtaa

SEQ ID NO: 22 - DNA, 2211 bp, Artificial Sequence
  AAV1 VP1/2 Rh8 VP3
atggctgccgatggttatcttccagattggctcgaggacaacctctctgagggcattcgcgagtggtgggacttgaaacctggagccccgaagcccaaagccaaccagcaaaagcaggacgacggccggggtctggtgcttcctggctacaagtacctcggacccttcaacggactcgacaagggggagcccgtcaacgcggcggacgcagcggccctcgagcacgacaaggcctacgaccagcagctcaaagcgggtgacaatccgtacctgcggtataaccacgccgacgccgagtttcaggagcgtctgcaagaagatacgtcttttgggggcaacctcgggcgagcagtcttccaggccaagaagcgggttctcgaacctctcggtctggttgaggaaggcgctaagacggctcctggaaagaaacgtccggtagagcagtcgccacaagagccagactcctcctcgggcatcggcaagacaggccagcagcccgctaaaaagagactcaattttggtcagactggcgactcagagtcagtccccgatccacaacctctcggagaacctccagcaacccccgctgctgtgggacctactacaatggctgcaggcggtggcgctccaatggcagacaataacgaaggcgccgacggagtgggtaattcctcgggaaattggcattgcgattccacatggctgggggacagagtcatcaccaccagcacccgaacctgggccctgcccacctacaacaaccacctctacaagcaaatctccaacggcacctcgggaggaagcaccaacgacaacacctattttggctacagcaccccctgggggtattttgacttcaacagattccactgtcacttttcaccacgtgactggcaacgactcatcaacaacaattggggattccggcccaaaagactcaacttcaagctgttcaacatccaggtcaaggaagtcacgacgaacgaaggcaccaagaccatcgccaataatctcaccagcaccgtgcaggtctttacggactcggagtaccagttaccgtacgtgctaggatccgctcaccagggatgtctgcctccgttcccggcggacgtcttcatggttcctcagtacggctatttaactttaaacaatggaagccaagccctgggacgttcctccttctactgtctggagtatttcccatcgcagatgctgagaaccggcaacaactttcagttcagctacaccttcgaggacgtgcctttccacagcagctacgcgcacagccagagcctggacaggctgatgaatcccctcatcgaccagtacctgtactacctggtcagaacgcaaacgactggaactggagggacgcagactctggcattcagccaagcgggtcctagctcaatggccaaccaggctagaaattgggtgcccggaccttgctaccggcagcagcgcgtctccacgacaaccaaccagaacaacaacagcaactttgcctggacgggagctgccaagtttaagctgaacggccgagactctctaatgaatccgggcgtggcaatggcttcccacaaggatgacgacgaccgcttcttcccttcgagcggggtcctgatttttggcaagcaaggagccgggaacgatggagtggattacagccaagtgctgattacagatgaggaagaaatcaaggctaccaaccccgtggccacagaagaatatggagcagtggccatcaacaaccaggccgccaatacgcaggcgcagaccggactcgtgcacaaccagggggtgattcccggcatggtgtggcagaatagagacgtgtacctgcagggtcccatctgggccaaaattcctcacacggacggcaactttcacccgtctcccctgatgggcggctttggactgaagcacccgcctcctcaaattctcatcaagaacacaccggttccagcggacccgccgcttaccttcaaccaggccaagctgaactctttcatcacgcagtacagcaccggacaggtcagcgtggaaatcgagtgggagctgcagaaagaaaacagcaaacgctggaatccagagattcaatacacttccaactactacaaatctacaaatgtggactttgctgtcaacacggagggggtttatagcgagcctcgccccattggcacccgttacctcacccgcaacctgtaa

SEQ ID NO: 23 - DNA, 2214 bp, Artificial Sequence
  AAV7 VP1/2 Rh8 VP3
atggctgccgatggttatcttccagattggctcgaggacaacctctctgagggcattcgcgagtggtgggacctgaaacctggagccccgaaacccaaagccaaccagcaaaagcaggacaacggccggggtctggtgcttcctggctacaagtacctcggacccttcaacggactcgacaagggggagcccgtcaacgcggcggacgcagcggccctcgagcacgacaaggcctacgaccagcagctcaaagcgggtgacaatccgtacctgcggtataaccacgccgacgccgagtttcaggagcgtctgcaagaagatacgtcatttgggggcaacctcgggcgagcagtcttccaggccaagaagcgggttctcgaacctctcggtctggttgaggaaggcgctaagacggctcctgcaaagaagagaccggtagagccgtcacctcagcgttcccccgactcctccacgggcatcggcaagaaaggccagcagcccgccagaaagagactcaatttcggtcagactggcgactcagagtcagtccccgaccctcaacctctcggagaacctccagcagcgccctctagtgtgggatctggtacaatggctgcaggcggtggcgctccaatggcagacaataacgaaggcgccgacggagtgggtaattcctcgggaaattggcattgcgattccacatggctgggggacagagtcatcaccaccagcacccgaacctgggccctgcccacctacaacaaccacctctacaagcaaatctccaacggcacctcgggaggaagcaccaacgacaacacctattttggctacagcaccccctgggggtattttgacttcaacagattccactgtcacttttcaccacgtgactggcaacgactcatcaacaacaattggggattccggcccaaaagactcaacttcaagctgttcaacatccaggtcaaggaagtcacgacgaacgaaggcaccaagaccatcgccaataatctcaccagcaccgtgcaggtctttacggactcggagtaccagttaccgtacgtgctaggatccgctcaccagggatgtctgcctccgttcccggcggacgtcttcatggttcctcagtacggctatttaactttaaacaatggaagccaagccctgggacgttcctccttctactgtctggagtatttcccatcgcagatgctgagaaccggcaacaactttcagttcagctacaccttcgaggacgtgcctttccacagcagctacgcgcacagccagagcctggacaggctgatgaatcccctcatcgaccagtacctgtactacctggtcagaacgcaaacgactggaactggagggacgcagactctggcattcagccaagcgggtcctagctcaatggccaaccaggctagaaattgggtgcccggaccttgctaccggcagcagcgcgtctccacgacaaccaaccagaacaacaacagcaactttgcctggacgggagctgccaagtttaagctgaacggccgagactctctaatgaatccgggcgtggcaatggcttcccacaaggatgacgacgaccgcttcttcccttcgagcggggtcctgatttttggcaagcaaggagccgggaacgatggagtggattacagccaagtgctgattacagatgaggaagaaatcaaggctaccaaccccgtggccacagaagaatatggagcagtggccatcaacaaccaggccgccaatacgcaggcgcagaccggactcgtgcacaaccagggggtgattcccggcatggtgtggcagaatagagacgtgtacctgcagggtcccatctgggccaaaattcctcacacggacggcaactttcacccgtctcccctgatgggcggctttggactgaagcacccgcctcctcaaattctcatcaagaacacaccggttccagcggacccgccgcttaccttcaaccaggccaagctgaactctttcatcacgcagtacagcaccggacaggtcagcgtggaaatcgagtgggagctgcagaaagaaaacagcaaacgctggaatccagagattcaatacacttccaactactacaaatctacaaatgtggactttgctgtcaacacggagggggtttatagcgagcctcgccccattggcacccgttacctcacccgcaacctgtaa

SEQ ID NO: 24 - DNA, 2214 bp, Artificial Sequence
  AAV9 VP1/2 Rh74 VP3
atggctgccgatggttatcttccagattggctcgaggacaaccttagtgaaggaattcgcgagtggtgggctttgaaacctggagcccctcaacccaaggcaaatcaacaacatcaagacaacgctcgaggtcttgtgcttccgggttacaaataccttggacccggcaacggactcgacaagggggagccggtcaacgcagcagacgcggcggccctcgagcacgacaaggcctacgaccagcagctcaaggccggagacaacccgtacctcaagtacaaccacgccgacgccgagttccaggagcggctcaaagaagatacgtcttttgggggcaacctcgggcgagcagtcttccaggccaaaaagaggcttcttgaacctcttggtctggttgaggaagcggctaagacggctcctggaaagaagaggcctgtagagcagtctcctcaggaaccggactcctccgcgggtattggcaaatcgggtgcacagcccgctaaaaagagactcaatttcggtcagactggcgacacagagtcagtcccagaccctcaaccaatcggagaacctcccgcagccccctcaggtgtgggatctcttacaatggctgcaggcggtggcgctccaatggcagacaataacgaaggcgccgacggagtgggtagttcctcaggaaattggcattgcgattccacatggctgggcgacagagtcatcaccaccagcacccgaacctgggccctccccacctacaacaaccacctctacaagcaaatctccaacgggacttcgggaggaagcaccaacgacaacacctacttcggctacagcaccccctgggggtattttgactttaacagattccactgccacttctcaccacgtgactggcagcgactcatcaacaacaactggggattccggcccaagagactcaacttcaagctcttcaacatccaggtcaaggaggtcacgcagaatgaaggcaccaagaccatcgccaataaccttaccagcacgattcaggtctttacggactcggaataccagctcccgtacgtcctcggctctgcgcaccagggctgcctgcctccgttcccggcggacgtcttcatgattcctcagtacgggtacctgactctgaacaatggcagtcaggccgtgggccgttcctccttctactgcctggagtactttccttctcaaatgctgagaacgggcaacaactttgagttcagctacaactttgaggacgtgccttttcacagcagctacgcgcacagccaaagcctggaccggctgatgaaccccctcatcgaccagtacctgtactacctgtctcggactcagtccacgggaggtaccgcaggaactcagcagttgctattttctcaggccgggcctaataacatgtcggctcaggccaaaaactggctacccgggccctgctaccggcagcaacgcgtctccacgacactgtcgcaaaataacaacagcaactttgcctggaccggtgccaccaagtatcatctgaatggcagagactctctggtaaatcccggtgtcgctatggcaacccacaaggacgacgaagagcgattttttccgtccagcggagtcttaatgtttgggaaacagggagctggaaaagacaacgtggactatagcagcgttatgctaaccagtgaggaagaaattaaaaccaccaacccagtggccacagaacagtacggcgtggtggccgataacctgcaacagcaaaacgccgctcctattgtaggggccgtcaacagtcaaggagccttacctggcatggtctggcagaaccgggacgtgtacctgcagggtcctatctgggccaagattcctcacacggacggaaactttcatccctcgccgctgatgggaggctttggactgaaacacccgcctcctcagatcctgattaagaatacacctgttcccgcggatcctccaactaccttcaaccaagctaagctggcgtcgttcatcacgcagtacagcaccggacaggtcagcgtggaaattgaatgggagctgcagaaagaaaacagcaaacgctggaacccagagattcaatacacttccaactactacaaatctacaaatgtggactttgctgttaacacagagggcacttattctgagcctcgccccatcggcacccgttacctcacccgtaatctgtaa

SEQ ID NO: 25 - DNA, 2214 bp, Artificial Sequence
  AAV1 VP1/2 Rh74 VP3
atggctgccgatggttatcttccagattggctcgaggacaacctctctgagggcattcgcgagtggtgggacttgaaacctggagccccgaagcccaaagccaaccagcaaaagcaggacgacggccggggtctggtgcttcctggctacaagtacctcggacccttcaacggactcgacaagggggagcccgtcaacgcggcggacgcagcggccctcgagcacgacaaggcctacgaccagcagctcaaagcgggtgacaatccgtacctgcggtataaccacgccgacgccgagtttcaggagcgtctgcaagaagatacgtcttttgggggcaacctcgggcgagcagtcttccaggccaagaagcgggttctcgaacctctcggtctggttgaggaaggcgctaagacggctcctggaaagaaacgtccggtagagcagtcgccacaagagccagactcctcctcgggcatcggcaagacaggccagcagcccgctaaaaagagactcaattttggtcagactggcgactcagagtcagtccccgatccacaacctctcggagaacctccagcaacccccgctgctgtgggacctactacaatggctgcaggcggtggcgctccaatggcagacaataacgaaggcgccgacggagtgggtagttcctcaggaaattggcattgcgattccacatggctgggcgacagagtcatcaccaccagcacccgaacctgggccctccccacctacaacaaccacctctacaagcaaatctccaacgggacttcgggaggaagcaccaacgacaacacctacttcggctacagcaccccctgggggtattttgactttaacagattccactgccacttctcaccacgtgactggcagcgactcatcaacaacaactggggattccggcccaagagactcaacttcaagctcttcaacatccaggtcaaggaggtcacgcagaatgaaggcaccaagaccatcgccaataaccttaccagcacgattcaggtctttacggactcggaataccagctcccgtacgtcctcggctctgcgcaccagggctgcctgcctccgttcccggcggacgtcttcatgattcctcagtacgggtacctgactctgaacaatggcagtcaggccgtgggccgttcctccttctactgcctggagtactttccttctcaaatgctgagaacgggcaacaactttgagttcagctacaactttgaggacgtgccttttcacagcagctacgcgcacagccaaagcctggaccggctgatgaaccccctcatcgaccagtacctgtactacctgtctcggactcagtccacgggaggtaccgcaggaactcagcagttgctattttctcaggccgggcctaataacatgtcggctcaggccaaaaactggctacccgggccctgctaccggcagcaacgcgtctccacgacactgtcgcaaaataacaacagcaactttgcctggaccggtgccaccaagtatcatctgaatggcagagactctctggtaaatcccggtgtcgctatggcaacccacaaggacgacgaagagcgattttttccgtccagcggagtcttaatgtttgggaaacagggagctggaaaagacaacgtggactatagcagcgttatgctaaccagtgaggaagaaattaaaaccaccaacccagtggccacagaacagtacggcgtggtggccgataacctgcaacagcaaaacgccgctcctattgtaggggccgtcaacagtcaaggagccttacctggcatggtctggcagaaccgggacgtgtacctgcagggtcctatctgggccaagattcctcacacggacggaaactttcatccctcgccgctgatgggaggctttggactgaaacacccgcctcctcagatcctgattaagaatacacctgttcccgcggatcctccaactaccttcaaccaagctaagctggcgtcgttcatcacgcagtacagcaccggacaggtcagcgtggaaattgaatgggagctgcagaaagaaaacagcaaacgctggaacccagagattcaatacacttccaactactacaaatctacaaatgtggactttgctgttaacacagagggcacttattctgagcctcgccccatcggcacccgttacctcacccgtaatctgtaa

SEQ ID NO: 26 - DNA, 2217 bp, Artificial Sequence
  AAV7 VP1/2 Rh74 VP3
atggctgccgatggttatcttccagattggctcgaggacaacctctctgagggcattcgcgagtggtgggacctgaaacctggagccccgaaacccaaagccaaccagcaaaagcaggacaacggccggggtctggtgcttcctggctacaagtacctcggacccttcaacggactcgacaagggggagcccgtcaacgcggcggacgcagcggccctcgagcacgacaaggcctacgaccagcagctcaaagcgggtgacaatccgtacctgcggtataaccacgccgacgccgagtttcaggagcgtctgcaagaagatacgtcatttgggggcaacctcgggcgagcagtcttccaggccaagaagcgggttctcgaacctctcggtctggttgaggaaggcgctaagacggctcctgcaaagaagagaccggtagagccgtcacctcagcgttcccccgactcctccacgggcatcggcaagaaaggccagcagcccgccagaaagagactcaatttcggtcagactggcgactcagagtcagtccccgaccctcaacctctcggagaacctccagcagcgccctctagtgtgggatctggtacaatggctgcaggcggtggcgctccaatggcagacaataacgaaggcgccgacggagtgggtagttcctcaggaaattggcattgcgattccacatggctgggcgacagagtcatcaccaccagcacccgaacctgggccctccccacctacaacaaccacctctacaagcaaatctccaacgggacttcgggaggaagcaccaacgacaacacctacttcggctacagcaccccctgggggtattttgactttaacagattccactgccacttctcaccacgtgactggcagcgactcatcaacaacaactggggattccggcccaagagactcaacttcaagctcttcaacatccaggtcaaggaggtcacgcagaatgaaggcaccaagaccatcgccaataaccttaccagcacgattcaggtctttacggactcggaataccagctcccgtacgtcctcggctctgcgcaccagggctgcctgcctccgttcccggcggacgtcttcatgattcctcagtacgggtacctgactctgaacaatggcagtcaggccgtgggccgttcctccttctactgcctggagtactttccttctcaaatgctgagaacgggcaacaactttgagttcagctacaactttgaggacgtgccttttcacagcagctacgcgcacagccaaagcctggaccggctgatgaaccccctcatcgaccagtacctgtactacctgtctcggactcagtccacgggaggtaccgcaggaactcagcagttgctattttctcaggccgggcctaataacatgtcggctcaggccaaaaactggctacccgggccctgctaccggcagcaacgcgtctccacgacactgtcgcaaaataacaacagcaactttgcctggaccggtgccaccaagtatcatctgaatggcagagactctctggtaaatcccggtgtcgctatggcaacccacaaggacgacgaagagcgattttttccgtccagcggagtcttaatgtttgggaaacagggagctggaaaagacaacgtggactatagcagcgttatgctaaccagtgaggaagaaattaaaaccaccaacccagtggccacagaacagtacggcgtggtggccgataacctgcaacagcaaaacgccgctcctattgtaggggccgtcaacagtcaaggagccttacctggcatggtctggcagaaccgggacgtgtacctgcagggtcctatctgggccaagattcctcacacggacggaaactttcatccctcgccgctgatgggaggctttggactgaaacacccgcctcctcagatcctgattaagaatacacctgttcccgcggatcctccaactaccttcaaccaagctaagctggcgtcgttcatcacgcagtacagcaccggacaggtcagcgtggaaattgaatgggagctgcagaaagaaaacagcaaacgctggaacccagagattcaatacacttccaactactacaaatctacaaatgtggactttgctgttaacacagagggcacttattctgagcctcgccccatcggcacccgttacctcacccgtaatctgtaa

SEQ ID NO: 27 - DNA, 2250 bp, Artificial Sequence
  Rh74 RGD insertion
atggctgccgatggttatcttccagattggctcgaggacaacctctctgagggcattcgcgagtggtgggacttgaaacctggagccccgaaacccaaagccaaccagcaaaagcaggacaacggccggggtctggtgcttcctggctacaagtacctcggacccttcaacggactcgacaagggggagcccgtcaacgcggcggacgcagcggccctcgagcacgacaaggcctacgaccagcagctccaagcgggtgacaatccgtacctgcggtataaccacgccgacgccgagtttcaggagcgtctgcaagaagatacgtcttttgggggcaacctcgggcgagcagtcttccaggccaagaagcgggttctcgaacctctcggtctggttgagtctcctgtgaagacggctcctggaaagaagagaccggtagagccatcaccccagcgttctccagactcctctacgggcatcggcaagaaaggccagcagcccgcgaaaaagagactcaactttgggcagactggcgactcagagtcagtgcccgaccctcaaccaatcggagaaccccccgcaggcccctctggtctgggatctggtacaatggctgcaggcggtggcgctccaatggcagacaataacgaaggcgccgacggagtgggtagttcctcaggaaattggcattgcgattccacatggctgggcgacagagtcatcaccaccagcacccgaacctgggccctccccacctacaacaaccacctctacaagcaaatctccaacgggacttcgggaggaagcaccaacgacaacacctacttcggctacagcaccccctgggggtattttgactttaacagattccactgccacttctcaccacgtgactggcagcgactcatcaacaacaactggggattccggcccaagagactcaacttcaagctcttcaacatccaggtcaaggaggtcacgcagaatgaaggcaccaagaccatcgccaataaccttaccagcacgattcaggtctttacggactcggaataccagctcccgtacgtcctcggctctgcgcaccagggctgcctgcctccgttcccggcggacgtcttcatgattcctcagtacgggtacctgactctgaacaatggcagtcaggccgtgggccgttcctccttctactgcctggagtactttccttctcaaatgctgagaacgggcaacaactttgagttcagctacaactttgaggacgtgccttttcacagcagctacgcgcacagccaaagcctggaccggctgatgaaccccctcatcgaccagtacctgtactacctgtctcggactcagtccacgggaggtaccgcaggaactcagcagttgctattttctcaggccgggcctaataacatgtcggctcaggccaaaaactggctacccgggccctgctaccggcagcaacgcgtctccacgacactgtcgcaaaataacaacagcaactttgcctggaccggtgccaccaagtatcatctgaatggcagagactctctggtaaatcccggtgtcgctatggcaacccacaaggacgacgaagagcgattttttccgtccagcggagtcttaatgtttgggaaacagggagctggaaaagacaacgtggactatagcagcgttatgctaaccagtgaggaagaaattaaaaccaccaacccagtggccacagaacagtacggcgtggtggccgataacctgcaacagcaaggaagtggtcgaggtgacctcggtctttctggtggagccgctcctattgtaggggccgtcaacagtcaaggagccttacctggcatggtctggcagaaccgggacgtgtacctgcagggtcctatctgggccaagattcctcacacggacggaaactttcatccctcgccgctgatgggaggctttggactgaaacacccgcctcctcagatcctgattaagaatacacctgttcccgcggatcctccaactaccttcaaccaagctaagctggcgtcgttcatcacgcagtacagcaccggacaggtcagcgtggaaattgaatgggagctgcagaaagaaaacagcaaacgctggaacccagagattcaatacacttccaactactacaaatctacaaatgtggactttgctgttaacacagagggcacttattctgagcctcgccccatcggcacccgttacctcacccgtaatctgtaa

SEQ ID NO: 28 - DNA, 2244 bp, Artificial Sequence
  Rh8 RGD insertion
atggctgccgatggttatcttccagattggctcgaggacaacctctctgagggcattcgcgagtggtgggacttgaaacctggagccccgaaacccaaagccaaccagcaaaagcaggacgacggccggggtctggtgcttcctggctacaagtacctcggacccttcaacggactcgacaagggggagcccgtcaacgcggcggacgcagcggccctcgagcacgacaaagcctacgaccagcagctcaaagcgggtgacaatccgtacctgcggtataatcacgccgacgccgagtttcaggagcgtctgcaagaagatacgtcttttgggggcaacctcgggcgagcagtcttccaggccaagaagcgggttctcgaacctctcggtctggttgaggaaggcgctaagacggctcctggaaagaagagaccggtagagcagtcgccacaagagccagactcctcctcgggcatcggcaagacaggccagcagcccgctaaaaagagactcaattttggtcagactggcgactcagagtcagtccccgacccacaacctctcggagaacctccagcagccccctcaggtctgggacctaatacaatggcttcaggcggtggcgctccaatggcagacaataacgaaggcgccgacggagtgggtaattcctcgggaaattggcattgcgattccacatggctgggggacagagtcatcaccaccagcacccgaacctgggccctgcccacctacaacaaccacctctacaagcaaatctccaacggcacctcgggaggaagcaccaacgacaacacctattttggctacagcaccccctgggggtattttgacttcaacagattccactgtcacttttcaccacgtgactggcaacgactcatcaacaacaattggggattccggcccaaaagactcaacttcaagctgttcaacatccaggtcaaggaagtcacgacgaacgaaggcaccaagaccatcgccaataatctcaccagcaccgtgcaggtctttacggactcggagtaccagttaccgtacgtgctaggatccgctcaccagggatgtctgcctccgttcccggcggacgtcttcatggttcctcagtacggctatttaactttaaacaatggaagccaagccctgggacgttcctccttctactgtctggagtatttcccatcgcagatgctgagaaccggcaacaactttcagttcagctacaccttcgaggacgtgcctttccacagcagctacgcgcacagccagagcctggacaggctgatgaatcccctcatcgaccagtacctgtactacctggtcagaacgcaaacgactggaactggagggacgcagactctggcattcagccaagcgggtcctagctcaatggccaaccaggctagaaattgggtgcccggaccttgctaccggcagcagcgcgtctccacgacaaccaaccagaacaacaacagcaactttgcctggacgggagctgccaagtttaagctgaacggccgagactctctaatgaatccgggcgtggcaatggcttcccacaaggatgacgacgaccgcttcttcccttcgagcggggtcctgatttttggcaagcaaggagccgggaacgatggagtggattacagccaagtgctgattacagatgaggaagaaatcaaggctaccaaccccgtggccacagaagaatatggagcagtggccatcaacaaccaggccgccaatacgggaagtggtcgaggtgacctcggtctttctggtggagcgcagaccggactcgtgcacaaccagggggtgattcccggcatggtgtggcagaatagagacgtgtacctgcagggtcccatctgggccaaaattcctcacacggacggcaactttcacccgtctcccctgatgggcggctttggactgaagcacccgcctcctcaaattctcatcaagaacacaccggttccagcggacccgccgcttaccttcaaccaggccaagctgaactctttcatcacgcagtacagcaccggacaggtcagcgtggaaatcgagtgggagctgcagaaagaaaacagcaaacgctggaatccagagattcaatacacttccaactactacaaatctacaaatgtggactttgctgtcaacacggagggggtttatagcgagcctcgccccattggcacccgttacctcacccgcaacctgtaa

SEQ ID NO: 29 - DNA, 1860 bp, Artificial Sequence
  Rh74 S371-VP2 (VP1 and VP3 wildtype Rh74)
atgggcagcctggacgagagcttctacgactggttcgagagacagctgggcggcggtgctcctggaaagaagagaccggtagagccatcaccccagcgttctccagactcctctacgggcatcggcaagaaaggccagcagcccgcgaaaaagagactcaactttgggcagactggcgactcagagtcagtgcccgaccctcaaccaatcggagaaccccccgcaggcccctctggtctgggatctggtacaatggctgcaggcggtggcgctccaatggcagacaataacgaaggcgccgacggagtgggtagttcctcaggaaattggcattgcgattccacatggctgggcgacagagtcatcaccaccagcacccgaacctgggccctccccacctacaacaaccacctctacaagcaaatctccaacgggacttcgggaggaagcaccaacgacaacacctacttcggctacagcaccccctgggggtattttgactttaacagattccactgccacttctcaccacgtgactggcagcgactcatcaacaacaactggggattccggcccaagagactcaacttcaagctcttcaacatccaggtcaaggaggtcacgcagaatgaaggcaccaagaccatcgccaataaccttaccagcacgattcaggtctttacggactcggaataccagctcccgtacgtcctcggctctgcgcaccagggctgcctgcctccgttcccggcggacgtcttcatgattcctcagtacgggtacctgactctgaacaatggcagtcaggccgtgggccgttcctccttctactgcctggagtactttccttctcaaatgctgagaacgggcaacaactttgagttcagctacaactttgaggacgtgccttttcacagcagctacgcgcacagccaaagcctggaccggctgatgaaccccctcatcgaccagtacctgtactacctgtctcggactcagtccacgggaggtaccgcaggaactcagcagttgctattttctcaggccgggcctaataacatgtcggctcaggccaaaaactggctacccgggccctgctaccggcagcaacgcgtctccacgacactgtcgcaaaataacaacagcaactttgcctggaccggtgccaccaagtatcatctgaatggcagagactctctggtaaatcccggtgtcgctatggcaacccacaaggacgacgaagagcgattttttccgtccagcggagtcttaatgtttgggaaacagggagctggaaaagacaacgtggactatagcagcgttatgctaaccagtgaggaagaaattaaaaccaccaacccagtggccacagaacagtacggcgtggtggccgataacctgcaacagcaaaacgccgctcctattgtaggggccgtcaacagtcaaggagccttacctggcatggtctggcagaaccgggacgtgtacctgcagggtcctatctgggccaagattcctcacacggacggaaactttcatccctcgccgctgatgggaggctttggactgaaacacccgcctcctcagatcctgattaagaatacacctgttcccgcggatcctccaactaccttcaaccaagctaagctggcgtcgttcatcacgcagtacagcaccggacaggtcagcgtggaaattgaatgggagctgcagaaagaaaacagcaaacgctggaacccagagattcaatacacttccaactactacaaatctacaaatgtggactttgctgttaacacagagggcacttattctgagcctcgccccatcggcacccgttacctcacccgtaatctgtaa

SEQ ID NO: 30 - DNA, 1920 bp, Artificial Sequence
  Rh74 S519-VP2 (VP1 and VP3 wildtype Rh74)
atgagcctggaggaggagtgggcccaggtggagtgcgaggtgtacggcagaggctgccccagcggcagcctggacgagagcttctacgactggttcgagagacagctgggcggcggtgctcctggaaagaagagaccggtagagccatcaccccagcgttctccagactcctctacgggcatcggcaagaaaggccagcagcccgcgaaaaagagactcaactttgggcagactggcgactcagagtcagtgcccgaccctcaaccaatcggagaaccccccgcaggcccctctggtctgggatctggtacaatggctgcaggcggtggcgctccaatggcagacaataacgaaggcgccgacggagtgggtagttcctcaggaaattggcattgcgattccacatggctgggcgacagagtcatcaccaccagcacccgaacctgggccctccccacctacaacaaccacctctacaagcaaatctccaacgggacttcgggaggaagcaccaacgacaacacctacttcggctacagcaccccctgggggtattttgactttaacagattccactgccacttctcaccacgtgactggcagcgactcatcaacaacaactggggattccggcccaagagactcaacttcaagctcttcaacatccaggtcaaggaggtcacgcagaatgaaggcaccaagaccatcgccaataaccttaccagcacgattcaggtctttacggactcggaataccagctcccgtacgtcctcggctctgcgcaccagggctgcctgcctccgttcccggcggacgtcttcatgattcctcagtacgggtacctgactctgaacaatggcagtcaggccgtgggccgttcctccttctactgcctggagtactttccttctcaaatgctgagaacgggcaacaactttgagttcagctacaactttgaggacgtgccttttcacagcagctacgcgcacagccaaagcctggaccggctgatgaaccccctcatcgaccagtacctgtactacctgtctcggactcagtccacgggaggtaccgcaggaactcagcagttgctattttctcaggccgggcctaataacatgtcggctcaggccaaaaactggctacccgggccctgctaccggcagcaacgcgtctccacgacactgtcgcaaaataacaacagcaactttgcctggaccggtgccaccaagtatcatctgaatggcagagactctctggtaaatcccggtgtcgctatggcaacccacaaggacgacgaagagcgattttttccgtccagcggagtcttaatgtttgggaaacagggagctggaaaagacaacgtggactatagcagcgttatgctaaccagtgaggaagaaattaaaaccaccaacccagtggccacagaacagtacggcgtggtggccgataacctgcaacagcaaaacgccgctcctattgtaggggccgtcaacagtcaaggagccttacctggcatggtctggcagaaccgggacgtgtacctgcagggtcctatctgggccaagattcctcacacggacggaaactttcatccctcgccgctgatgggaggctttggactgaaacacccgcctcctcagatcctgattaagaatacacctgttcccgcggatcctccaactaccttcaaccaagctaagctggcgtcgttcatcacgcagtacagcaccggacaggtcagcgtggaaattgaatgggagctgcagaaagaaaacagcaaacgctggaacccagagattcaatacacttccaactactacaaatctacaaatgtggactttgctgttaacacagagggcacttattctgagcctcgccccatcggcacccgttacctcacccgtaatctgtaa

SEQ ID NO: 31 - DNA, 1941 bp, Artificial Sequence
  Rh74 S961-VP2 (VP1 and VP3 wildtype Rh74)
atgggcagcctggacgagagcttctacgactggttcgagagacagctgggcggcggcagcggcggcagcagcctggaggaggagtgggcccagatccagtgcgaggtgtggggcagaggctgccccagctacggcggtgctcctggaaagaagagaccggtagagccatcaccccagcgttctccagactcctctacgggcatcggcaagaaaggccagcagcccgcgaaaaagagactcaactttgggcagactggcgactcagagtcagtgcccgaccctcaaccaatcggagaaccccccgcaggcccctctggtctgggatctggtacaatggctgcaggcggtggcgctccaatggcagacaataacgaaggcgccgacggagtgggtagttcctcaggaaattggcattgcgattccacatggctgggcgacagagtcatcaccaccagcacccgaacctgggccctccccacctacaacaaccacctctacaagcaaatctccaacgggacttcgggaggaagcaccaacgacaacacctacttcggctacagcaccccctgggggtattttgactttaacagattccactgccacttctcaccacgtgactggcagcgactcatcaacaacaactggggattccggcccaagagactcaacttcaagctcttcaacatccaggtcaaggaggtcacgcagaatgaaggcaccaagaccatcgccaataaccttaccagcacgattcaggtctttacggactcggaataccagctcccgtacgtcctcggctctgcgcaccagggctgcctgcctccgttcccggcggacgtcttcatgattcctcagtacgggtacctgactctgaacaatggcagtcaggccgtgggccgttcctccttctactgcctggagtactttccttctcaaatgctgagaacgggcaacaactttgagttcagctacaactttgaggacgtgccttttcacagcagctacgcgcacagccaaagcctggaccggctgatgaaccccctcatcgaccagtacctgtactacctgtctcggactcagtccacgggaggtaccgcaggaactcagcagttgctattttctcaggccgggcctaataacatgtcggctcaggccaaaaactggctacccgggccctgctaccggcagcaacgcgtctccacgacactgtcgcaaaataacaacagcaactttgcctggaccggtgccaccaagtatcatctgaatggcagagactctctggtaaatcccggtgtcgctatggcaacccacaaggacgacgaagagcgattttttccgtccagcggagtcttaatgtttgggaaacagggagctggaaaagacaacgtggactatagcagcgttatgctaaccagtgaggaagaaattaaaaccaccaacccagtggccacagaacagtacggcgtggtggccgataacctgcaacagcaaaacgccgctcctattgtaggggccgtcaacagtcaaggagccttacctggcatggtctggcagaaccgggacgtgtacctgcagggtcctatctgggccaagattcctcacacggacggaaactttcatccctcgccgctgatgggaggctttggactgaaacacccgcctcctcagatcctgattaagaatacacctgttcccgcggatcctccaactaccttcaaccaagctaagctggcgtcgttcatcacgcagtacagcaccggacaggtcagcgtggaaattgaatgggagctgcagaaagaaaacagcaaacgctggaacccagagattcaatacacttccaactactacaaatctacaaatgtggactttgctgttaacacagagggcacttattctgagcctcgccccatcggcacccgttacctcacccgtaatctgtaa

SEQ ID NO: 32 - DNA, 2412 bp, Artificial Sequence
  Rh74 VP1 S519 (VP2 and VP3 wildtype Rh74)
atggctgccgatggttatcttccagattggctcgaggacaacctctctgagggcattcgcgagtggtgggacttgaaacctggagccccgaaacccaaagccaaccagcaaaagcaggacaacggccggggtctggtgcttcctggctacaagtacctcggacccttcaacggactcgacaagggggagcccgtcaacgcggcggacgcagcggccctcgagcacgacaaggcctacgaccagcagctccaagcgggtgacaatccgtacctgcggtataaccacgccgacgccgagtttcaggagcgtctgcaagaagatacgtcttttgggggcaacctcgggcgagcagtcttccaggccaagaagcgggttctcgaacctctcggtctggttgagtctcctgtgaagacggctcctggaaagaagagaccggtagagccatcaccccagcgttctccagactcctctacgggcatcggcaagaaaggccagcagcccgcgaaaaagagactcaactttgggcagactggcgactcagagtcagtgcccgaccctcaaccaatcggagaaccccccgcaggcccctctggtctgggatctggtacaatggctgcaggcggtggcgctccaatggcagacaataacgaaggcgccgacggagtgggtagttcctcaggaaattggcattgcgattccacatggctgggcgacagagtcatcaccaccagcacccgaacctgggccctccccacctacaacaaccacctctacaagcaaatctccaacgggacttcgggaggaagcaccaacgacaacacctacttcggctacagcaccccctgggggtattttgactttaacagattccactgccacttctcaccacgtgactggcagcgactcatcaacaacaactggggattccggcccaagagactcaacttcaagctcttcaacatccaggtcaaggaggtcacgcagaatgaaggcaccaagaccatcgccaataaccttaccagcacgattcaggtctttacggactcggaataccagctcccgtacgtcctcggctctgcgcaccagggctgcctgcctccgttcccggcggacgtcttcatgattcctcagtacgggtacctgactctgaacaatggcagtcaggccgtgggccgttcctccttctactgcctggagtactttccttctcaaatgctgagaacgggcaacaactttgagttcagctacaactttgaggacgtgccttttcacagcagctacgcgcacagccaaagcctggaccggctgatgaaccccctcatcgaccagtacctgtactacctgtctcggactcagtccacgggaggtaccgcaggaactcagcagttgctattttctcaggccgggcctaataacatgtcggctcaggccaaaaactggctacccgggccctgctaccggcagcaacgcgtctccacgacactgtcgcaaaataacaacagcaactttgcctggaccggtgccaccaagtatcatctgaatggcagagactctctggtaaatcccggtgtcgctatggcaacccacaaggacgacgaagagcgattttttccgtccagcggagtcttaatgtttgggaaacagggagctggaaaagacaacgtggactatagcagcgttatgctaaccagtgaggaagaaattaaaaccaccaacccagtggccacagaacagtacggcgtggtggccgataacctgcaacagcaaggtgggggcggttccggaggcggagggagtgggggaggcggttccggcggtggaggttctggtggtggaggtagcagtcttgaggaggaatgggcgcaggtagaatgtgaagtgtatggccgaggatgtccctctggatcacttgacgagtcattttatgattggttcgagagacaactcggagggggtggtgcaaacgccgctcctattgtaggggccgtcaacagtcaaggagccttacctggcatggtctggcagaaccgggacgtgtacctgcagggtcctatctgggccaagattcctcacacggacggaaactttcatccctcgccgctgatgggaggctttggactgaaacacccgcctcctcagatcctgattaagaatacacctgttcccgcggatcctccaactaccttcaaccaagctaagctggcgtcgttcatcacgcagtacagcaccggacaggtcagcgtggaaattgaatgggagctgcagaaagaaaacagcaaacgctggaacccagagattcaatacacttccaactactacaaatctacaaatgtggactttgctgttaacacagagggcacttattctgagcctcgccccatcggcacccgttacctcacccgtaatctgtaa

SEQ ID NO: 33 - DNA, 2436 bp, Artificial Sequence
  Rh74 VP1 S961 (VP2 and VP3 wildtype Rh74)
atggctgccgatggttatcttccagattggctcgaggacaacctctctgagggcattcgcgagtggtgggacttgaaacctggagccccgaaacccaaagccaaccagcaaaagcaggacaacggccggggtctggtgcttcctggctacaagtacctcggacccttcaacggactcgacaagggggagcccgtcaacgcggcggacgcagcggccctcgagcacgacaaggcctacgaccagcagctccaagcgggtgacaatccgtacctgcggtataaccacgccgacgccgagtttcaggagcgtctgcaagaagatacgtcttttgggggcaacctcgggcgagcagtcttccaggccaagaagcgggttctcgaacctctcggtctggttgagtctcctgtgaagacggctcctggaaagaagagaccggtagagccatcaccccagcgttctccagactcctctacgggcatcggcaagaaaggccagcagcccgcgaaaaagagactcaactttgggcagactggcgactcagagtcagtgcccgaccctcaaccaatcggagaaccccccgcaggcccctctggtctgggatctggtacaatggctgcaggcggtggcgctccaatggcagacaataacgaaggcgccgacggagtgggtagttcctcaggaaattggcattgcgattccacatggctgggcgacagagtcatcaccaccagcacccgaacctgggccctccccacctacaacaaccacctctacaagcaaatctccaacgggacttcgggaggaagcaccaacgacaacacctacttcggctacagcaccccctgggggtattttgactttaacagattccactgccacttctcaccacgtgactggcagcgactcatcaacaacaactggggattccggcccaagagactcaacttcaagctcttcaacatccaggtcaaggaggtcacgcagaatgaaggcaccaagaccatcgccaataaccttaccagcacgattcaggtctttacggactcggaataccagctcccgtacgtcctcggctctgcgcaccagggctgcctgcctccgttcccggcggacgtcttcatgattcctcagtacgggtacctgactctgaacaatggcagtcaggccgtgggccgttcctccttctactgcctggagtactttccttctcaaatgctgagaacgggcaacaactttgagttcagctacaactttgaggacgtgccttttcacagcagctacgcgcacagccaaagcctggaccggctgatgaaccccctcatcgaccagtacctgtactacctgtctcggactcagtccacgggaggtaccgcaggaactcagcagttgctattttctcaggccgggcctaataacatgtcggctcaggccaaaaactggctacccgggccctgctaccggcagcaacgcgtctccacgacactgtcgcaaaataacaacagcaactttgcctggaccggtgccaccaagtatcatctgaatggcagagactctctggtaaatcccggtgtcgctatggcaacccacaaggacgacgaagagcgattttttccgtccagcggagtcttaatgtttgggaaacagggagctggaaaagacaacgtggactatagcagcgttatgctaaccagtgaggaagaaattaaaaccaccaacccagtggccacagaacagtacggcgtggtggccgataacctgcaacagcaaggtggtggtggatctggaggtggcgggtctggcggcggaggatctggtgggggaggctccggaggcggaggtagcggttcattggatgagtcattctatgattggtttgagcggcagcttggcggtggttcaggaggtagctcccttgaggaggaatgggcacaaatccaatgtgaggtttggggcaggggatgtccgtcttatggcgggggtggtgcaaacgccgctcctattgtaggggccgtcaacagtcaaggagccttacctggcatggtctggcagaaccgggacgtgtacctgcagggtcctatctgggccaagattcctcacacggacggaaactttcatccctcgccgctgatgggaggctttggactgaaacacccgcctcctcagatcctgattaagaatacacctgttcccgcggatcctccaactaccttcaaccaagctaagctggcgtcgttcatcacgcagtacagcaccggacaggtcagcgtggaaattgaatgggagctgcagaaagaaaacagcaaacgctggaacccagagattcaatacacttccaactactacaaatctacaaatgtggactttgctgttaacacagagggcacttattctgagcctcgccccatcggcacccgttacctcacccgtaatctgtaa

SEQ ID NO: 34 - DNA, 2661 bp, Artificial Sequence
  Rh74 VP1 MuSK VHH (VP2 and VP3 wildtype Rh74)
atggctgccgatggttatcttccagattggctcgaggacaacctctctgagggcattcgcgagtggtgggacttgaaacctggagccccgaaacccaaagccaaccagcaaaagcaggacaacggccggggtctggtgcttcctggctacaagtacctcggacccttcaacggactcgacaagggggagcccgtcaacgcggcggacgcagcggccctcgagcacgacaaggcctacgaccagcagctccaagcgggtgacaatccgtacctgcggtataaccacgccgacgccgagtttcaggagcgtctgcaagaagatacgtcttttgggggcaacctcgggcgagcagtcttccaggccaagaagcgggttctcgaacctctcggtctggttgagtctcctgtgaagacggctcctggaaagaagagaccggtagagccatcaccccagcgttctccagactcctctacgggcatcggcaagaaaggccagcagcccgcgaaaaagagactcaactttgggcagactggcgactcagagtcagtgcccgaccctcaaccaatcggagaaccccccgcaggcccctctggtctgggatctggtacaatggctgcaggcggtggcgctccaatggcagacaataacgaaggcgccgacggagtgggtagttcctcaggaaattggcattgcgattccacatggctgggcgacagagtcatcaccaccagcacccgaacctgggccctccccacctacaacaaccacctctacaagcaaatctccaacgggacttcgggaggaagcaccaacgacaacacctacttcggctacagcaccccctgggggtattttgactttaacagattccactgccacttctcaccacgtgactggcagcgactcatcaacaacaactggggattccggcccaagagactcaacttcaagctcttcaacatccaggtcaaggaggtcacgcagaatgaaggcaccaagaccatcgccaataaccttaccagcacgattcaggtctttacggactcggaataccagctcccgtacgtcctcggctctgcgcaccagggctgcctgcctccgttcccggcggacgtcttcatgattcctcagtacgggtacctgactctgaacaatggcagtcaggccgtgggccgttcctccttctactgcctggagtactttccttctcaaatgctgagaacgggcaacaactttgagttcagctacaactttgaggacgtgccttttcacagcagctacgcgcacagccaaagcctggaccggctgatgaaccccctcatcgaccagtacctgtactacctgtctcggactcagtccacgggaggtaccgcaggaactcagcagttgctattttctcaggccgggcctaataacatgtcggctcaggccaaaaactggctacccgggccctgctaccggcagcaacgcgtctccacgacactgtcgcaaaataacaacagcaactttgcctggaccggtgccaccaagtatcatctgaatggcagagactctctggtaaatcccggtgtcgctatggcaacccacaaggacgacgaagagcgattttttccgtccagcggagtcttaatgtttgggaaacagggagctggaaaagacaacgtggactatagcagcgttatgctaaccagtgaggaagaaattaaaaccaccaacccagtggccacagaacagtacggcgtggtggccgataacctgcaacagcaaggtggtggaggttcaggaggcggtggttctggcggaggaggtagtggtggcggtggatcaggcggaggtggaagtgaggttcaactgcaggcatctggtggcggtttcgttcaggccggcggtagtctgaggctgagctgcgccgtgagcggcatcaccctgaggacctatggtatgcactgggtgaggcaggcccccggcaaggagagggagtttgtcgcaggtatcagcttcgacggtaggagtgagtactacgccgacagcgtgcagggcaggttcaccatcagcagggacaacgccaagaacaccgtgtacctgcagatgaacagcctgaagcccgaggacaccgccacctactactgcgccaggggcgcccactacggcttcgacatctactggggccagggcacccaggtgaccgtgagcagcggtggtggaggtgcaaacgccgctcctattgtaggggccgtcaacagtcaaggagccttacctggcatggtctggcagaaccgggacgtgtacctgcagggtcctatctgggccaagattcctcacacggacggaaactttcatccctcgccgctgatgggaggctttggactgaaacacccgcctcctcagatcctgattaagaatacacctgttcccgcggatcctccaactaccttcaaccaagctaagctggcgtcgttcatcacgcagtacagcaccggacaggtcagcgtggaaattgaatgggagctgcagaaagaaaacagcaaacgctggaacccagagattcaatacacttccaactactacaaatctacaaatgtggactttgctgttaacacagagggcacttattctgagcctcgccccatcggcacccgttacctcacccgtaatctgtaa

SEQ ID NO: 35 - protein, 863 aa, Artificial Sequence
  LBV29
MAADGYLPDWLEDNLSEGIREWWDLKPGAPKPKANQQKQDNGRGLVLPGYKYLGPFNGLDKGEPVNAADAAALEHDKAYDQQLQAGDNPYLRYNHADAEFQERLQEDTSFGGNLGRAVFQAKKRVLEPLGLVESPVKTAPGKKRPVEPSPQRSPDSSTGIGKKGQQPAKKRLNFGQTGDSESVPDPQPIGEPPAGPSGLGSGTMAAGGGAPMADNNEGADGVGSSSGNWHCDSTWLGDRVITTSTRTWALPTYNNHLYKQISNGTSGGSTNDNTYFGYSTPWGYFDFNRFHCHFSPRDWQRLINNNWGFRPKRLNFKLFNIQVKEVTQNEGTKTIANNLTSTIQVFTDSEYQLPYVLGSAHQGCLPPFPADVFMIPQYGYLTLNNGSQAVGRSSFYCLEYFPSQMLRTGNNFEFSYNFEDVPFHSSYAHSQSLDRLMNPLIDQYLYYLSRTQSTGGTAGTQQLLFSQAGPNNMSAQAKNWLPGPCYRQQRVSTTLSQNNNSNFAWTGATKYHLNGRDSLVNPGVAMATHKDDEERFFPSSGVLMFGKQGAGKDNVDYSSVMLTSEEEIKTTNPVATEQYGVVADNLQQQGGGGSGGGGSGGGGSGGGGSGGGGSTPFYPVGYTVKQPGTCGDGVLQPGEECDDGNPDVSDGCIDCHRAYCGDGYRHQGVEDCDGSDFGYLTCETYLPGSYGDLRCTQYCSIDSTPCRYFTGGGGAAAPIVGAVNSQGALPGMVWQNRDVYLQGPIWAKIPHTDGNFHPSPLMGGFGLKHPPPQILIKNTPVPADPPTTFNQAKLASFITQYSTGQVSVEIEWELQKENSKRWNPEIQYTSNYYKSTNVDFAVNTEGTYSEPRPIGTRYLTRNL

SEQ ID NO: 36 - protein, 863 aa, Artificial Sequence; identical to SEQ ID NO: 35
  LBV30

SEQ ID NO: 37 - protein, 842 aa, Artificial Sequence
  LBV31
MSFVDHPPDWLEEIGEGLKEFLGLEPGPPKPKPNQQKQDDARGLVLPGYNYLGPGNGLDRGEPVNRADEVAREHDISYNEQLQAGDNPYLKYNHADAEFQEKLADDTSFGGNLGKAVFQAKKRVLEPFGLVEEPVKTAAKGERIDDHYPKKKKARIEETEAGTSGAQQLQIPAQPASSLGADTMSAGGGSPLGDNNQGADGVGNASGDWHCDSTWMGDRVITKSTRTWVLPSYNNHQYLEIHSGSVDGSNANAYFGYSTPWGYFDFNRFHSHWSPRDWQRLVNNYWGFRPRSLKVKIFNIQVKEVTTQDGTTTIANNLTSTVQVFTDNDYQLPYVIGNGTEGCLPAFPPQVFTLPQYGYATLNRNNTDDPTERSSFFCLEYFPSKMLRTGNNFEFTYSFEEVPFHCSFAPSQNLFKLANPLVDQYLYRFVSTDTSGNLQFQKNLKARYANTYKNWFPGPMCRTQGWYTSAGTYNNKGVANFDTSNKMELEGASYQVNPQPNGMTNTLQDSNKYALENTMIFNAQNAPPGTTSLYQENNLLITSESETQPVNRLAYNTGGQVSNNNQNSNGGGGSGGGGSGGGGSGGGGSGGGGSTPFYPVGYTVKQPGTCGDGVLQPGEECDDGNPDVSDGCIDCHRAYCGDGYRHQGVEDCDGSDFGYLTCETYLPGSYGDLRCTQYCSIDSTPCRYFTGGGGATHPTVGVYNHQEVLPGSVWMDRDVYLQGPIWAKIPETGAHFHPSPAMGGFGLKHPPPMMLIKNTPVPSNVAAFSDVPVKSFITQYSTGQVTVEIEWELKKENSKRWNPEIQYTNNYNNPTFVDFAPDTSGEYRTTRAIGTRYLTRPL

SEQ ID NO: 38 - protein, 863 aa, Artificial Sequence; identical to SEQ ID NO: 35
  LBV32

SEQ ID NO: 39 - protein, 842 aa, Artificial Sequence
  LBV33
MSFVDHPPDWLEEIGEGLKEFLGLEPGPPKPKPNQQKQDDARGLVLPGYNYLGPGNGLDRGEPVNRADEVAREHDISYNEQLQAGDNPYLKYNHADAEFQEKLADDTSFGGNLGKAVFQAKKRVLEPFGLVEEPVKTAAGKKRIDDHYPKKKKARIEETEAGTSGAQQLQIPAQPASSLGADTMSAGGGSPLGDNNQGADGVGNASGDWHCDSTWMGDRVITKSTRTWVLPSYNNHQYLEIHSGSVDGSNANAYFGYSTPWGYFDFNRFHSHWSPRDWQRLVNNYWGFRPRSLKVKIFNIQVKEVTTQDGTTTIANNLTSTVQVFTDNDYQLPYVIGNGTEGCLPAFPPQVFTLPQYGYATLNRNNTDDPTERSSFFCLEYFPSKMLRTGNNFEFTYSFEEVPFHCSFAPSQNLFKLANPLVDQYLYRFVSTDTSGNLQFQKNLKARYANTYKNWFPGPMCRTQGWYTSAGTYNNKGVANFDTSNKMELEGASYQVNPQPNGMTNTLQDSNKYALENTMIFNAQNAPPGTTSLYQENNLLITSESETQPVNRLAYNTGGQVSNNNQNSNGGGGSGGGGSGGGGSGGGGSGGGGSTPFYPVGYTVKQPGTCGDGVLQPGEECDDGNPDVSDGCIDCHRAYCGDGYRHQGVEDCDGSDFGYLTCETYLPGSYGDLRCTQYCSIDSTPCRYFTGGGGATHPTVGVYNHQEVLPGSVWMDRDVYLQGPIWAKIPETGAHFHPSPAMGGFGLKHPPPMMLIKNTPVPSNVAAFSDVPVKSFITQYSTGQVTVEIEWELKKENSKRWNPEIQYTNNYNNPTFVDFAPDTSGEYRTTRAIGTRYLTRPL

SEQ ID NO: 40 - protein, 862 aa, Artificial Sequence
  LBV34
MAADGYLPDWLEDNLSEGIREWWDLKPGAPKPKANQQKQDNGRGLVLPGYKYLGPFNGLDKGEPVNAADAAALEHDKAYDQQLQAGDNPYLRYNHADAEFQERLQEDTSFGGNLGRAVFQAKKRVLEPLGLVESPVKTAPGKKRPVEPSPQRSPDSSTGIGKKGQQPAKKRLNFGQTGDSESVPDPQPIGEPPAGPSGLGSGTMSAGGGSPLGDNNQGADGVGNASGDWHCDSTWMGDRVITKSTRTWVLPSYNNHQYLEIHSGSVDGSNANAYFGYSTPWGYFDFNRFHSHWSPRDWQRLVNNYWGFRPRSLKVKIFNIQVKEVTTQDGTTTIANNLTSTVQVFTDNDYQLPYVIGNGTEGCLPAFPPQVFTLPQYGYATLNRNNTDDPTERSSFFCLEYFPSKMLRTGNNFEFTYSFEEVPFHCSFAPSQNLFKLANPLVDQYLYRFVSTDTSGNLQFQKNLKARYANTYKNWFPGPMCRTQGWYTSAGTYNNKGVANFDTSNKMELEGASYQVNPQPNGMTNTLQDSNKYALENTMIFNAQNAPPGTTSLYQENNLLITSESETQPVNRLAYNTGGQVSNNNQNSNGGGGSGGGGSGGGGSGGGGSGGGGSTPFYPVGYTVKQPGTCGDGVLQPGEECDDGNPDVSDGCIDCHRAYCGDGYRHQGVEDCDGSDFGYLTCETYLPGSYGDLRCTQYCSIDSTPCRYFTGGGGATHPTVGVYNHQEVLPGSVWMDRDVYLQGPIWAKIPETGAHFHPSPAMGGFGLKHPPPMMLIKNTPVPSNVAAFSDVPVKSFITQYSTGQVTVEIEWELKKENSKRWNPEIQYTNNYNNPTFVDFAPDTSGEYRTTRAIGTRYLTRPL

SEQ ID NO: 41 - protein, 849 aa, Artificial Sequence
  LBV35
MTDGYLPDWLEDNLSEGVREWWALQPGAPKPKANQQHQDNARGLVLPGYKYLGPGNGLDKGEPVNAADAAALEHDKAYDQQLKAGDNPYLKYNHADAEFQQRLQGDTSFGGNLGRAVFQAKKRVLEPLGLVEQAGETAPGKKRPLIESPQQPDSSTGIGKKGKQPAKKKLVFEDETGAGDGPPEGSTSGAMSAGGGSPLGDNNQGADGVGNASGDWHCDSTWMGDRVITKSTRTWVLPSYNNHQYLEIHSGSVDGSNANAYFGYSTPWGYFDFNRFHSHWSPRDWQRLVNNYWGFRPRSLKVKIFNIQVKEVTTQDGTTTIANNLTSTVQVFTDNDYQLPYVIGNGTEGCLPAFPPQVFTLPQYGYATLNRNNTDDPTERSSFFCLEYFPSKMLRTGNNFEFTYSFEEVPFHCSFAPSQNLFKLANPLVDQYLYRFVSTDTSGNLQFQKNLKARYANTYKNWFPGPMCRTQGWYTSAGTYNNKGVANFDTSNKMELEGASYQVNPQPNGMTNTLQDSNKYALENTMIFNAQNAPPGTTSLYQENNLLITSESETQPVNRLAYNTGGQVSNNNQNSNGGGGSGGGGSGGGGSGGGGSGGGGSTPFYPVGYTVKQPGTCGDGVLQPGEECDDGNPDVSDGCIDCHRAYCGDGYRHQGVEDCDGSDFGYLTCETYLPGSYGDLRCTQYCSIDSTPCRYFTGGGGATHPTVGVYNHQEVLPGSVWMDRDVYLQGPIWAKIPETGAHFHPSPAMGGFGLKHPPPMMLIKNTPVPSNVAAFSDVPVKSFITQYSTGQVTVEIEWELKKENSKRWNPEIQYTNNYNNPTFVDFAPDTSGEYRTTRAIGTRYLTRPL

SEQ ID NO: 42 - protein, 863 aa, Artificial Sequence; identical to SEQ ID NO: 35
  LBV41

SEQ ID NO: 43 - protein, 749 aa, Artificial Sequence; identical to SEQ ID NO: 10
  LBV42

SEQ ID NO: 44 - protein, 749 aa, Artificial Sequence; identical to SEQ ID NO: 10
  LBV43

SEQ ID NO: 45 - protein, 850 aa, Artificial Sequence
  LBV44
MTDGYLPDWLEDNLSEGVREWWALQPGAPKPKANQQHQDNARGLVLPGYKYLGPGNGLDKGEPVNAADAAALEHDKAYDQQLKAGDNPYLKYNHADAEFQQRLQGDTSFGGNLGRAVFQAKKRVLEPLGLVEQAGETAPGKKRPLIESPQQPDSSTGIGKKGKQPAKKKLVFEDETGAGDGPPEGSTSGAMAAGGGAPMADNNEGADGVGSSSGNWHCDSTWLGDRVITTSTRTWALPTYNNHLYKQISNGTSGGSTNDNTYFGYSTPWGYFDFNRFHCHFSPRDWQRLINNNWGFRPKRLNFKLFNIQVKEVTQNEGTKTIANNLTSTIQVFTDSEYQLPYVLGSAHQGCLPPFPADVFMIPQYGYLTLNNGSQAVGRSSFYCLEYFPSQMLRTGNNFEFSYNFEDVPFHSSYAHSQSLDRLMNPLIDQYLYYLSRTQSTGGTAGTQQLLFSQAGPNNMSAQAKNWLPGPCYRQQRVSTTLSQNNNSNFAWTGATKYHLNGRDSLVNPGVAMATHKDDEERFFPSSGVLMFGKQGAGKDNVDYSSVMLTSEEEIKTTNPVATEQYGVVADNLQQQGGGGSGGGGSGGGGSGGGGSGGGGSTPFYPVGYTVKQPGTCGDGVLQPGEECDDGNPDVSDGCIDCHRAYCGDGYRHQGVEDCDGSDFGYLTCETYLPGSYGDLRCTQYCSIDSTPCRYFTGGGGAAAPIVGAVNSQGALPGMVWQNRDVYLQGPIWAKIPHTDGNFHPSPLMGGFGLKHPPPQILIKNTPVPADPPTTFNQAKLASFITQYSTGQVSVEIEWELQKENSKRWNPEIQYTSNYYKSTNVDFAVNTEGTYSEPRPIGTRYLTRNL

SEQ ID NO: 46 - protein, 736 aa, Artificial Sequence
  LBV45
MTDGYLPDWLEDNLSEGVREWWALQPGAPKPKANQQHQDNARGLVLPGYKYLGPGNGLDKGEPVNAADAAALEHDKAYDQQLKAGDNPYLKYNHADAEFQQRLQGDTSFGGNLGRAVFQAKKRVLEPLGLVEQAGETAPGKKRPLIESPQQPDSSTGIGKKGKQPAKKKLVFEDETGAGDGPPEGSTSGAMAAGGGAPMADNNEGADGVGSSSGNWHCDSTWLGDRVITTSTRTWALPTYNNHLYKQISNGTSGGSTNDNTYFGYSTPWGYFDFNRFHCHFSPRDWQRLINNNWGFRPKRLNFKLFNIQVKEVTQNEGTKTIANNLTSTIQVFTDSEYQLPYVLGSAHQGCLPPFPADVFMIPQYGYLTLNNGSQAVGRSSFYCLEYFPSQMLRTGNNFEFSYNFEDVPFHSSYAHSQSLDRLMNPLIDQYLYYLSRTQSTGGTAGTQQLLFSQAGPNNMSAQAKNWLPGPCYRQQRVSTTLSQNNNSNFAWTGATKYHLNGRDSLVNPGVAMATHKDDEERFFPSSGVLMFGKQGAGKDNVDYSSVMLTSEEEIKTTNPVATEQYGVVADNLQQQGSGRGDLGLSGGAAPIVGAVNSQGALPGMVWQNRDVYLQGPIWAKIPHTDGNFHPSPLMGGFGLKHPPPQILIKNTPVPADPPTTFNQAKLASFITQYSTGQVSVEIEWELQKENSKRWNPEIQYTSNYYKSTNVDFAVNTEGTYSEPRPIGTRYLTRNL

SEQ ID NO: 47 - protein, 862 aa, Artificial Sequence
  LBV46
MAADGYLPDWLEDNLSEGIREWWALKPGAPQPKANQQHQDNARGLVLPGYKYLGPGNGLDKGEPVNAADAAALEHDKAYDQQLKAGDNPYLKYNHADAEFQERLKEDTSFGGNLGRAVFQAKKRLLEPLGLVEEAAKTAPGKKRPVEQSPQEPDSSAGIGKSGAQPAKKRLNFGQTGDTESVPDPQPIGEPPAAPSGVGSLTMASGGGAPVADNNEGADGVGSSSGNWHCDSQWLGDRVITTSTRTWALPTYNNHLYKQISNSTSGGSSNDNAYFGYSTPWGYFDFNRFHCHFSPRDWQRLINNNWGFRPKRLNFKLFNIQVKEVTDNNGVKTIANNLTSTVQVFTDSDYQLPYVLGSAHEGCLPPFPADVFMIPQYGYLTLNDGSQAVGRSSFYCLEYFPSQMLRTGNNFQFSYEFENVPFHSSYAHSQSLDRLMNPLIDQYLYYLSKTINGSGQNQQTLKFSVAGPSNMAVQGRNYIPGPSYRQQRVSTTVTQNNNSEFAWPGASSWALNGRNSLMNPGPAMASHKEGEDRFFPLSGSLIFGKQGTGRDNVDADKVMITNEEEIKTTNPVATESYGQVATNHQSAQGGGGSGGGGSGGGGSGGGGSGGGGSTPFYPVGYTVKQPGTCGDGVLQPGEECDDGNPDVSDGCIDCHRAYCGDGYRHQGVEDCDGSDFGYLTCETYLPGSYGDLRCTQYCSIDSTPCRYFTGGGGAAQAQTGWVQNQGILPGMVWQDRDVYLQGPIWAKIPHTDGNFHPSPLMGGFGMKHPPPQILIKNTPVPADPPTAFNKDKLNSFITQYSTGQVSVEIEWELQKENSKRWNPEIQYTSNYYKSNNVEFAVNTEGVYSEPRPIGTRYLTRNL

SEQ ID NO: 48 - protein, 748 aa, Artificial Sequence
  LBV47
MAADGYLPDWLEDNLSEGIREWWALKPGAPQPKANQQHQDNARGLVLPGYKYLGPGNGLDKGEPVNAADAAALEHDKAYDQQLKAGDNPYLKYNHADAEFQERLKEDTSFGGNLGRAVFQAKKRLLEPLGLVEEAAKTAPGKKRPVEQSPQEPDSSAGIGKSGAQPAKKRLNFGQTGDTESVPDPQPIGEPPAAPSGVGSLTMASGGGAPVADNNEGADGVGSSSGNWHCDSQWLGDRVITTSTRTWALPTYNNHLYKQISNSTSGGSSNDNAYFGYSTPWGYFDFNRFHCHFSPRDWQRLINNNWGFRPKRLNFKLFNIQVKEVTDNNGVKTIANNLTSTVQVFTDSDYQLPYVLGSAHEGCLPPFPADVFMIPQYGYLTLNDGSQAVGRSSFYCLEYFPSQMLRTGNNFQFSYEFENVPFHSSYAHSQSLDRLMNPLIDQYLYYLSKTINGSGQNQQTLKFSVAGPSNMAVQGRNYIPGPSYRQQRVSTTVTQNNNSEFAWPGASSWALNGRNSLMNPGPAMASHKEGEDRFFPLSGSLIFGKQGTGRDNVDADKVMITNEEEIKTTNPVATESYGQVATNHQSAQGSGRGDLGLSGGAQAQTGWVQNQGILPGMVWQDRDVYLQGPIWAKIPHTDGNFHPSPLMGGFGMKHPPPQILIKNTPVPADPPTAFNKDKLNSFITQYSTGQVSVEIEWELQKENSKRWNPEIQYTSNYYKSNNVEFAVNTEGVYSEPRPIGTRYLTRNL

SEQ ID NO: 49 - protein, 748 aa, Artificial Sequence; identical to SEQ ID NO: 48
  LBV48

SEQ ID NO: 50 - protein, 842 aa, Artificial Sequence; identical to SEQ ID NO: 37
  LBV49

SEQ ID NO: 51 - protein, 842 aa, Artificial Sequence; identical to SEQ ID NO: 39
  LBV50

SEQ ID NO: 52 - protein, 789 aa, Artificial Sequence
  LBV54
MAADGYLPDWLEDNLSEGIREWWALKPGAPQPKANQQHQDNARGLVLPGYKYLGPGNGLDKGEPVNAADAAALEHDKAYDQQLKAGDNPYLKYNHADAEFQERLKEDTSFGGNLGRAVFQAKKRLLEPLGLVEEAAKTAPGKKRPVEQSPQEPDSSAGIGKSGAQPAKKRLNFGQTGDTESVPDPQPIGEPPAAPSGVGSLTMASGGGAPVADNNEGADGVGSSSGNWHCDSQWLGDRVITTSTRTWALPTYNNHLYKQISNSTSGGSSNDNAYFGYSTPWGYFDFNRFHCHFSPRDWQRLINNNWGFRPKRLNFKLFNIQVKEVTDNNGVKTIANNLTSTVQVFTDSDYQLPYVLGSAHEGCLPPFPADVFMIPQYGYLTLNDGSQAVGRSSFYCLEYFPSQMLRTGNNFQFSYEFENVPFHSSYAHSQSLDRLMNPLIDQYLYYLSKTINGSGQNQQTLKFSVAGPSNMAVQGRNYIPGPSYRQQRVSTTVTQNNNSEFAWPGASSWALNGRNSLMNPGPAMASHKEGEDRFFPLSGSLIFGKQGTGRDNVDADKVMITNEEEIKTTNPVATESYGQVATNHQSAQGGGGSGGGGSSNSRGDYNSLGGGGSENRRGDFNNTGGGGSGRGDLSTPGGGGSAQAQTGWVQNQGILPGMVWQDRDVYLQGPIWAKIPHTDGNFHPSPLMGGFGMKHPPPQILIKNTPVPADPPTAFNKDKLNSFITQYSTGQVSVEIEWELQKENSKRWNPEIQYTSNYYKSNNVEFAVNTEGVYSEPRPIGTRYLTRNL

SEQ ID NO: 53 - protein, 889 aa, Artificial Sequence
  LBV55
MAADGYLPDWLEDNLSEGIREWWALKPGAPQPKANQQHQDNARGLVLPGYKYLGPGNGLDKGEPVNAADAAALEHDKAYDQQLKAGDNPYLKYNHADAEFQERLKEDTSFGGNLGRAVFQAKKRLLEPLGLVEEAAKTAPGKKRPVEQSPQEPDSSAGIGKSGAQPAKKRLNFGQTGDTESVPDPQPIGEPPAAPSGVGSLTMASGGGAPVADNNEGADGVGSSSGNWHCDSQWLGDRVITTSTRTWALPTYNNHLYKQISNSTSGGSSNDNAYFGYSTPWGYFDFNRFHCHFSPRDWQRLINNNWGFRPKRLNFKLFNIQVKEVTDNNGVKTIANNLTSTVQVFTDSDYQLPYVLGSAHEGCLPPFPADVFMIPQYGYLTLNDGSQAVGRSSFYCLEYFPSQMLRTGNNFQFSYEFENVPFHSSYAHSQSLDRLMNPLIDQYLYYLSKTINGSGQNQQTLKFSVAGPSNMAVQGRNYIPGPSYRQQRVSTTVTQNNNSEFAWPGASSWALNGRNSLMNPGPAMASHKEGEDRFFPLSGSLIFGKQGTGRDNVDADKVMITNEEEIKTTNPVATESYGQVATNHQSAQGGGGSGGGGSGGGGSGGGGSGGGGSEVQLQASGGGFVQAGGSLRLSCAVSGRGDLSTPSYGMHWVRQAPGKEREFVAGISRGDYNSLYYADSVQGRFTISRDNAKNTVYLQMNSLKPEDTATYYCAENRRGDFNNTYWGQGTQVTVSSGGGGSAQAQTGWVQNQGILPGMVWQDRDVYLQGPIWAKIPHTDGNFHPSPLMGGFGMKHPPPQILIKNTPVPADPPTAFNKDKLNSFITQYSTGQVSVEIEWELQKENSKRWNPEIQYTSNYYKSNNVEFAVNTEGVYSEPRPIGTRYLTRNL

SEQ ID NO: 54 - protein, 889 aa, Artificial Sequence; identical to SEQ ID NO: 53
  LBV56

SEQ ID NO: 55 - protein, 762 aa, Artificial Sequence
  LBV57
MAADGYLPDWLEDNLSEGIREWWALKPGAPQPKANQQHQDNARGLVLPGYKYLGPGNGLDKGEPVNAADAAALEHDKAYDQQLKAGDNPYLKYNHADAEFQERLKEDTSFGGNLGRAVFQAKKRLLEPLGLVEEAAKTAPGKKRPVEQSPQEPDSSAGIGKSGAQPAKKRLNFGQTGDTESVPDPQPIGEPPAAPSGVGSLTMASGGGAPVADNNEGADGVGSSSGNWHCDSQWLGDRVITTSTRTWALPTYNNHLYKQISNSTSGGSSNDNAYFGYSTPWGYFDFNRFHCHFSPRDWQRLINNNWGFRPKRLNFKLFNIQVKEVTDNNGVKTIANNLTSTVQVFTDSDYQLPYVLGSAHEGCLPPFPADVFMIPQYGYLTLNDGSQAVGRSSFYCLEYFPSQMLRTGNNFQFSYEFENVPFHSSYAHSQSLDRLMNPLIDQYLYYLSKTINGSGQNQQTLKFSVAGPSNMAVQGRNYIPGPSYRQQRVSTTVTQNNNSEFAWPGASSWALNGRNSLMNPGPAMASHKEGEDRFFPLSGSLIFGKQGTGRDNVDADKVMITNEEEIKTTNPVATESYGQVATNHQSAQGGGGACRGDYNSLCRGDLSTCGGGGSAQAQTGWVQNQGILPGMVWQDRDVYLQGPIWAKIPHTDGNFHPSPLMGGFGMKHPPPQILIKNTPVPADPPTAFNKDKLNSFITQYSTGQVSVEIEWELQKENSKRWNPEIQYTSNYYKSNNVEFAVNTEGVYSEPRPIGTRYLTRNL

SEQ ID NO: 56 - protein, 784 aa, Artificial Sequence
  LBV58
MAADGYLPDWLEDNLSEGIREWWALKPGAPQPKANQQHQDNARGLVLPGYKYLGPGNGLDKGEPVNAADAAALEHDKAYDQQLKAGDNPYLKYNHADAEFQERLKEDTSFGGNLGRAVFQAKKRLLEPLGLVEEAAKTAPGKKRPVEQSPQEPDSSAGIGKSGAQPAKKRLNFGQTGDTESVPDPQPIGEPPAAPSGVGSLTMASGGGAPVADNNEGADGVGSSSGNWHCDSQWLGDRVITTSTRTWALPTYNNHLYKQISNSTSGGSSNDNAYFGYSTPWGYFDFNRFHCHFSPRDWQRLINNNWGFRPKRLNFKLFNIQVKEVTDNNGVKTIANNLTSTVQVFTDSDYQLPYVLGSAHEGCLPPFPADVFMIPQYGYLTLNDGSQAVGRSSFYCLEYFPSQMLRTGNNFQFSYEFENVPFHSSYAHSQSLDRLMNPLIDQYLYYLSKTINGSGQNQQTLKFSVAGPSNMAVQGRNYIPGPSYRQQRVSTTVTQNNNSEFAWPGASSWALNGRNSLMNPGPAMASHKEGEDRFFPLSGSLIFGKQGTGRDNVDADKVMITNEEEIKTTNPVATESYGQVATNHQSAQGGGGSGGGGSGCSNSRGDYNSLSCSQDSDCLAGCVCGPNGFCGGGGGSAQAQTGWVQNQGILPGMVWQDRDVYLQGPIWAKIPHTDGNFHPSPLMGGFGMKHPPPQILIKNTPVPADPPTAFNKDKLNSFITQYSTGQVSVEIEWELQKENSKRWNPEIQYTSNYYKSNNVEFAVNTEGVYSEPRPIGTRYLTRNL

SEQ ID NO: 57 - protein, 769 aa, Artificial Sequence
  LBV59
MSFVDHPPDWLEEIGEGLKEFLGLEPGPPKPKPNQQKQDDARGLVLPGYNYLGPGNGLDRGEPVNRADEVAREHDISYNEQLQAGDNPYLKYNHADAEFQEKLADDTSFGGNLGKAVFQAKKRVLEPFGLVEEPVKTAAKGERIDDHYPKKKKARIEETEAGTSGAQQLQIPAQPASSLGADTMSAGGGSPLGDNNQGADGVGNASGDWHCDSTWMGDRVITKSTRTWVLPSYNNHQYLEIHSGSVDGSNANAYFGYSTPWGYFDFNRFHSHWSPRDWQRLVNNYWGFRPRSLKVKIFNIQVKEVTTQDGTTTIANNLTSTVQVFTDNDYQLPYVIGNGTEGCLPAFPPQVFTLPQYGYATLNRNNTDDPTERSSFFCLEYFPSKMLRTGNNFEFTYSFEEVPFHCSFAPSQNLFKLANPLVDQYLYRFVSTDTSGNLQFQKNLKARYANTYKNWFPGPMCRTQGWYTSAGTYNNKGVANFDTSNKMELEGASYQVNPQPNGMTNTLQDSNKYALENTMIFNAQNAPPGTTSLYQENNLLITSESETQPVNRLAYNTGGQVSNNNQNSNGGGGSGGGGSSNSRGDYNSLGGGGSENRRGDFNNTGGGGSGRGDLSTPGGGGSTHPTVGVYNHQEVLPGSVWMDRDVYLQGPIWAKIPETGAHFHPSPAMGGFGLKHPPPMMLIKNTPVPSNVAAFSDVPVKSFITQYSTGQVTVEIEWELKKENSKRWNPEIQYTNNYNNPTFVDFAPDTSGEYRTTRAIGTRYLTRPL

SEQ ID NO: 58 - protein, 869 aa, Artificial Sequence
  LBV60
MSFVDHPPDWLEEIGEGLKEFLGLEPGPPKPKPNQQKQDDARGLVLPGYNYLGPGNGLDRGEPVNRADEVAREHDISYNEQLQAGDNPYLKYNHADAEFQEKLADDTSFGGNLGKAVFQAKKRVLEPFGLVEEPVKTAAKGERIDDHYPKKKKARIEETEAGTSGAQQLQIPAQPASSLGADTMSAGGGSPLGDNNQGADGVGNASGDWHCDSTWMGDRVITKSTRTWVLPSYNNHQYLEIHSGSVDGSNANAYFGYSTPWGYFDFNRFHSHWSPRDWQRLVNNYWGFRPRSLKVKIFNIQVKEVTTQDGTTTIANNLTSTVQVFTDNDYQLPYVIGNGTEGCLPAFPPQVFTLPQYGYATLNRNNTDDPTERSSFFCLEYFPSKMLRTGNNFEFTYSFEEVPFHCSFAPSQNLFKLANPLVDQYLYRFVSTDTSGNLQFQKNLKARYANTYKNWFPGPMCRTQGWYTSAGTYNNKGVANFDTSNKMELEGASYQVNPQPNGMTNTLQDSNKYALENTMIFNAQNAPPGTTSLYQENNLLITSESETQPVNRLAYNTGGQVSNNNQNSNGGGGSGGGGSGGGGSGGGGSGGGGSEVQLQASGGGFVQAGGSLRLSCAVSGRGDLSTPSYGMHWVRQAPGKEREFVAGISRGDYNSLYYADSVQGRFTISRDNAKNTVYLQMNSLKPEDTATYYCAENRRGDFNNTYWGQGTQVTVSSGGGGSTHPTVGVYNHQEVLPGSVWMDRDVYLQGPIWAKIPETGAHFHPSPAMGGFGLKHPPPMMLIKNTPVPSNVAAFSDVPVKSFITQYSTGQVTVEIEWELKKENSKRWNPEIQYTNNYNNPTFVDFAPDTSGEYRTTRAIGTRYLTRPL

SEQ ID NO: 59 - protein, 778 aa, Artificial Sequence
  LBV61
MSFVDHPPDWLEEIGEGLKEFLGLEPGPPKPKPNQQKQDDARGLVLPGYNYLGPGNGLDRGEPVNRADEVAREHDISYNEQLQAGDNPYLKYNHADAEFQEKLADDTSFGGNLGKAVFQAKKRVLEPFGLVEEPVKTAAKGERIDDHYPKKKKARIEETEAGTSGAQQLQIPAQPASSLGADTMSAGGGSPLGDNNQGADGVGNASGDWHCDSTWMGDRVITKSTRTWVLPSYNNHQYLEIHSGSVDGSNANAYFGYSTPWGYFDFNRFHSHWSPRDWQRLVNNYWGFRPRSLKVKIFNIQVKEVTTQDGTTTIANNLTSTVQVFTDNDYQLPYVIGNGTEGCLPAFPPQVFTLPQYGYATLNRNNTDDPTERSSFFCLEYFPSKMLRTGNNFEFTYSFEEVPFHCSFAPSQNLFKLANPLVDQYLYRFVSTDTSGNLQFQKNLKARYANTYKNWFPGPMCRTQGWYTSAGTYNNKGVANFDTSNKMELEGASYQVNPQPNGMTNTLQDSNKYALENTMIFNAQNAPPGTTSLYQENNLLITSESETQPVNRLAYNTGGQVSNNNQNSNGGGGSGGGGSKFWATVGRGDLSTPFEVPVYAETLDEALELAENRRGDFNNTVTRVRPGGGGSTHPTVGVYNHQEVLPGSVWMDRDVYLQGPIWAKIPETGAHFHPSPAMGGFGLKHPPPMMLIKNTPVPSNVAAFSDVPVKSFITQYSTGQVTVEIEWELKKENSKRWNPEIQYTNNYNNPTFVDFAPDTSGEYRTTRAIGTRYLTRPL

SEQ ID NO: 60 - protein, 742 aa, Artificial Sequence
  LBV62
MSFVDHPPDWLEEIGEGLKEFLGLEPGPPKPKPNQQKQDDARGLVLPGYNYLGPGNGLDRGEPVNRADEVAREHDISYNEQLQAGDNPYLKYNHADAEFQEKLADDTSFGGNLGKAVFQAKKRVLEPFGLVEEPVKTAAKGERIDDHYPKKKKARIEETEAGTSGAQQLQIPAQPASSLGADTMSAGGGSPLGDNNQGADGVGNASGDWHCDSTWMGDRVITKSTRTWVLPSYNNHQYLEIHSGSVDGSNANAYFGYSTPWGYFDFNRFHSHWSPRDWQRLVNNYWGFRPRSLKVKIFNIQVKEVTTQDGTTTIANNLTSTVQVFTDNDYQLPYVIGNGTEGCLPAFPPQVFTLPQYGYATLNRNNTDDPTERSSFFCLEYFPSKMLRTGNNFEFTYSFEEVPFHCSFAPSQNLFKLANPLVDQYLYRFVSTDTSGNLQFQKNLKARYANTYKNWFPGPMCRTQGWYTSAGTYNNKGVANFDTSNKMELEGASYQVNPQPNGMTNTLQDSNKYALENTMIFNAQNAPPGTTSLYQENNLLITSESETQPVNRLAYNTGGQVSNNNQNSNGGGGACRGDYNSLCRGDLSTCGGGGSTHPTVGVYNHQEVLPGSVWMDRDVYLQGPIWAKIPETGAHFHPSPAMGGFGLKHPPPMMLIKNTPVPSNVAAFSDVPVKSFITQYSTGQVTVEIEWELKKENSKRWNPEIQYTNNYNNPTFVDFAPDTSGEYRTTRAIGTRYLTRPL

SEQ ID NO: 61 - protein, 764 aa, Artificial Sequence
  LBV63
MSFVDHPPDWLEEIGEGLKEFLGLEPGPPKPKPNQQKQDDARGLVLPGYNYLGPGNGLDRGEPVNRADEVAREHDISYNEQLQAGDNPYLKYNHADAEFQEKLADDTSFGGNLGKAVFQAKKRVLEPFGLVEEPVKTAAKGERIDDHYPKKKKARIEETEAGTSGAQQLQIPAQPASSLGADTMSAGGGSPLGDNNQGADGVGNASGDWHCDSTWMGDRVITKSTRTWVLPSYNNHQYLEIHSGSVDGSNANAYFGYSTPWGYFDFNRFHSHWSPRDWQRLVNNYWGFRPRSLKVKIFNIQVKEVTTQDGTTTIANNLTSTVQVFTDNDYQLPYVIGNGTEGCLPAFPPQVFTLPQYGYATLNRNNTDDPTERSSFFCLEYFPSKMLRTGNNFEFTYSFEEVPFHCSFAPSQNLFKLANPLVDQYLYRFVSTDTSGNLQFQKNLKARYANTYKNWFPGPMCRTQGWYTSAGTYNNKGVANFDTSNKMELEGASYQVNPQPNGMTNTLQDSNKYALENTMIFNAQNAPPGTTSLYQENNLLITSESETQPVNRLAYNTGGQVSNNNQNSNGGGGSGGGGSGCSNSRGDYNSLSCSQDSDCLAGCVCGPNGFCGGGGGSTHPTVGVYNHQEVLPGSVWMDRDVYLQGPIWAKIPETGAHFHPSPAMGGFGLKHPPPMMLIKNTPVPSNVAAFSDVPVKSFITQYSTGQVTVEIEWELKKENSKRWNPEIQYTNNYNNPTFVDFAPDTSGEYRTTRAIGTRYLTRPL

SEQ ID NO: 62 - protein, 789 aa, Artificial Sequence; identical to SEQ ID NO: 52
  LBV64

SEQ ID NO: 63 - protein, 889 aa, Artificial Sequence; identical to SEQ ID NO: 53
  LBV65

SEQ ID NO: 64 - protein, 798 aa, Artificial Sequence
  LBV66
MAADGYLPDWLEDNLSEGIREWWALKPGAPQPKANQQHQDNARGLVLPGYKYLGPGNGLDKGEPVNAADAAALEHDKAYDQQLKAGDNPYLKYNHADAEFQERLKEDTSFGGNLGRAVFQAKKRLLEPLGLVEEAAKTAPGKKRPVEQSPQEPDSSAGIGKSGAQPAKKRLNFGQTGDTESVPDPQPIGEPPAAPSGVGSLTMASGGGAPVADNNEGADGVGSSSGNWHCDSQWLGDRVITTSTRTWALPTYNNHLYKQISNSTSGGSSNDNAYFGYSTPWGYFDFNRFHCHFSPRDWQRLINNNWGFRPKRLNFKLFNIQVKEVTDNNGVKTIANNLTSTVQVFTDSDYQLPYVLGSAHEGCLPPFPADVFMIPQYGYLTLNDGSQAVGRSSFYCLEYFPSQMLRTGNNFQFSYEFENVPFHSSYAHSQSLDRLMNPLIDQYLYYLSKTINGSGQNQQTLKFSVAGPSNMAVQGRNYIPGPSYRQQRVSTTVTQNNNSEFAWPGASSWALNGRNSLMNPGPAMASHKEGEDRFFPLSGSLIFGKQGTGRDNVDADKVMITNEEEIKTTNPVATESYGQVATNHQSAQGGGGSGGGGSKFWATVGRGDLSTPFEVPVYAETLDEALELAENRRGDFNNTVTRVRPGGGGSAQAQTGWVQNQGILPGMVWQDRDVYLQGPIWAKIPHTDGNFHPSPLMGGFGMKHPPPQILIKNTPVPADPPTAFNKDKLNSFITQYSTGQVSVEIEWELQKENSKRWNPEIQYTSNYYKSNNVEFAVNTEGVYSEPRPIGTRYLTRNL

SEQ ID NO: 65 - protein, 762 aa, Artificial Sequence; identical to SEQ ID NO: 55
  LBV67

SEQ ID NO: 66 - protein, 784 aa, Artificial Sequence; identical to SEQ ID NO: 56
  LBV68

SEQ ID NO: 67 - protein, 769 aa, Artificial Sequence; identical to SEQ ID NO: 57
  LBV69

SEQ ID NO: 68 - protein, 869 aa, Artificial Sequence; identical to SEQ ID NO: 58
  LBV70

SEQ ID NO: 69 - protein, 778 aa, Artificial Sequence; identical to SEQ ID NO: 59
  LBV71

SEQ ID NO: 70 - protein, 742 aa, Artificial Sequence; identical to SEQ ID NO: 60
  LBV72

SEQ ID NO: 71 - protein, 764 aa, Artificial Sequence; identical to SEQ ID NO: 61
  LBV73

SEQ ID NO: 72 - protein, 842 aa, Artificial Sequence; identical to SEQ ID NO: 37
  LBV76

SEQ ID NO: 73 - protein, 889 aa, Artificial Sequence
  LBV91
MAADGYLPDWLEDNLSEGIREWWALKPGAPQPKANQQHQDNARGLVLPGYKYLGPGNGLDKGEPVNAADAAALEHDKAYDQQLKAGDNPYLKYNHADAEFQERLKEDTSFGGNLGRAVFQAKKRLLEPLGLVEEAAKTAPGKKRPVEQSPQEPDSSAGIGKSGAQPAKKRLNFGQTGDTESVPDPQPIGEPPAAPSGVGSLTMASGGGAPVADNNEGADGVGSSSGNWHCDSQWLGDRVITTSTRTWALPTYNNHLYKQISNSTSGGSSNDNAYFGYSTPWGYFDFNRFHCHFSPRDWQRLINNNWGFRPKRLNFKLFNIQVKEVTDNNGVKTIANNLTSTVQVFTDSDYQLPYVLGSAHEGCLPPFPADVFMIPQYGYLTLNDGSQAVGRSSFYCLEYFPSQMLRTGNNFQFSYEFENVPFHSSYAHSQSLDRLMNPLIDQYLYYLSKTINGSGQNQQTLKFSVAGPSNMAVQGRNYIPGPSYRQQRVSTTVTQNNNSEIAWPRASSWALNGRNSLMNPGPAMASHKEGEDRFFPLSGSLIFGKQGTGRDNVDADKVMITNEEEIKTTNPVATESYGQVATNHQSAQGGGGSGGGGSGGGGSGGGGSGGGGSEVQLQASGGGFVQAGGSLRLSCAVSGRGDLSTPSYGMHWVRQAPGKEREFVAGISRGDYNSLYYADSVQGRFTISRDNAKNTVYLQMNSLKPEDTATYYCAENRRGDFNNTYWGQGTQVTVSSGGGGSAQAQTGWVQNQGILPGMVWQDRDVYLQGPIWAKIPHTDGNFHPSPLMGGFGMKHPPPQILIKNTPVPADPPTAFNKDKLNSFITQYSTGQVSVEIEWELQKENSKRWNPEIQYTSNYCKSNNVEFAVNTEGVYSEPRPIGTRYLTRNL

SEQ ID NO: 74 - protein, 889 aa, Artificial Sequence; identical to SEQ ID NO: 73
  LBV92

SEQ ID NO: 75 - protein, 863 aa, Artificial Sequence
  LBV93
MAADGYLPDWLEDNLSEGIREWWDLKPGAPKPKANQQKQDNGRGLVLPGYKYLGPFNGLDKGEPVNAADAAALEHDKAYDQQLQAGDNPYLRYNHADAEFQERLQEDTSFGGNLGRAVFQAKKRVLEPLGLVESPVKTAPGKKRPVEPSPQRSPDSSTGIGKKGQQPAKKRLNFGQTGDSESVPDPQPIGEPPAGPSGLGSGTMAAGGGAPMADNNEGADGVGSSSGNWHCDSTWLGDRVITTSTRTWALPTYNNHLYKQISNGTSGGSTNDNTYFGYSTPWGYFDFNRFHCHFSPRDWQRLINNNWGFRPKRLNFKLFNIQVKEVTQNEGTKTIANNLTSTIQVFTDSEYQLPYVLGSAHQGCLPPFPADVFMIPQYGYLTLNNGSQAVGRSSFYCLEYFPSQMLRTGNNFEFSYNFEDVPFHSSYAHSQSLDRLMNPLIDQYLYYLSRTQSTGGTAGTQQLLFSQAGPNNMSAQAKNWLPGPCYRQQRVSTTLSQNNNSNIAWTRATKYHLNGRDSLVNPGVAMATHKDDEERFFPSSGVLMFGKQGAGKDNVDYSSVMLTSEEEIKTTNPVATEQYGVVADNLQQQGGGGSGGGGSGGGGSGGGGSGGGGSTPFYPVGYTVKQPGTCGDGVLQPGEECDDGNPDVSDGCIDCHRAYCGDGYRHQGVEDCDGSDFGYLTCETYLPGSYGDLRCTQYCSIDSTPCRYFTGGGGAAAPIVGAVNSQGALPGMVWQNRDVYLQGPIWAKIPHTDGNFHPSPLMGGFGLKHPPPQILIKNTPVPADPPTTFNQAKLASFITQYSTGQVSVEIEWELQKENSKRWNPEIQYTSNYCKSTNVDFAVNTEGTYSEPRPIGTRYLTRNL

SEQ ID NO: 76 - protein, 747 aa, Artificial Sequence
  LBV94
MAADGYLPDWLEDNLSEGIREWWDLKPGAPKPKANQQKQDNGRGLVLPGYKYLGPFNGLDKGEPVNAADAAALEHDKAYDQQLQAGDNPYLRYNHADAEFQERLQEDTSFGGNLGRAVFQAKKRVLEPLGLVESPVKTAPGKKRPVEPSPQRSPDSSTGIGKKGQQPAKKRLNFGQTGDSESVPDPQPIGEPPAGPSGLGSGTMAAGGGAPMADNNEGADGVGSSSGNWHCDSTWLGDRVITTSTRTWALPTYNNHLYKQISNGTSGGSTNDNTYFGYSTPWGYFDFNRFHCHFSPRDWQRLINNNWGFRPKRLNFKLFNIQVKEVTQNEGTKTIANNLTSTIQVFTDSEYQLPYVLGSAHQGCLPPFPADVFMIPQYGYLTLNNGSQAVGRSSFYCLEYFPSQMLRTGNNFEFSYNFEDVPFHSSYAHSQSLDRLMNPLIDQYLYYLSRTQSTGGTAGTQQLLFSQAGPNNMSAQAKNWLPGPCYRQQRVSTTLSQNNNSNIAWTRATKYHLNGRDSLVNPGVAMATHKDDEERFFPSSGVLMFGKQGAGKDNVDYSSVMLTSEEEIKTTNPVATEQYGVVADNLQQQSNSRGDYNSLAAPIVGAVNSQGALPGMVWQNRDVYLQGPIWAKIPHTDGNFHPSPLMGGFGLKHPPPQILIKNTPVPADPPTTFNQAKLASFITQYSTGQVSVEIEWELQKENSKRWNPEIQYTSNYCKSTNVDFAVNTEGTYSEPRPIGTRYLTRNL

SEQ ID NO: 77 - protein, 794 aa, Artificial Sequence
  LBV95
MAADGYLPDWLEDNLSEGIREWWDLKPGAPKPKANQQKQDNGRGLVLPGYKYLGPFNGLDKGEPVNAADAAALEHDKAYDQQLQAGDNPYLRYNHADAEFQERLQEDTSFGGNLGRAVFQAKKRVLEPLGLVESPVKTAPGKKRPVEPSPQRSPDSSTGIGKKGQQPAKKRLNFGQTGDSESVPDPQPIGEPPAGPSGLGSGTMAAGGGAPMADNNEGADGVGSSSGNWHCDSTWLGDRVITTSTRTWALPTYNNHLYKQISNGTSGGSTNDNTYFGYSTPWGYFDFNRFHCHFSPRDWQRLINNNWGFRPKRLNFKLFNIQVKEVTQNEGTKTIANNLTSTIQVFTDSEYQLPYVLGSAHQGCLPPFPADVFMIPQYGYLTLNNGSQAVGRSSFYCLEYFPSQMLRTGNNFEFSYNFEDVPFHSSYAHSQSLDRLMNPLIDQYLYYLSRTQSTGGTAGTQQLLFSQAGPNNMSAQAKNWLPGPCYRQQRVSTTLSQNNNSNIAWTRATKYHLNGRDSLVNPGVAMATHKDDEERFFPSSGVLMFGKQGAGKDNVDYSSVMLTSEEEIKTTNPVATEQYGVVADNLQQQGGGGSELTNEIPAGGGGSELTNEIPAGGGGSELTNEIPAGGGGSELTNEIPAGGGGSAAPIVGAVNSQGALPGMVWQNRDVYLQGPIWAKIPHTDGNFHPSPLMGGFGLKHPPPQILIKNTPVPADPPTTFNQAKLASFITQYSTGQVSVEIEWELQKENSKRWNPEIQYTSNYCKSTNVDFAVNTEGTYSEPRPIGTRYLTRNL

SEQ ID NO: 78 - protein, 939 aa, Artificial Sequence
  LBV96
MAADGYLPDWLEDNLSEGIREWWALKPGAPQPKANQQHQDNARGLVLPGYKYLGPGNGLDKGEPVNAADAAALEHDKAYDQQLKAGDNPYLKYNHADAEFQERLKEDTSFGGNLGRAVFQAKKRLLEPLGLVEEAAKTAPGKKRPVEQSPQEPDSSAGIGKSGAQPAKKRLNFGQTGDTESVPDPQPIGEPPAAPSGVGSLTMASGGGAPVADNNEGADGVGSSSGNWHCDSQWLGDRVITTSTRTWALPTYNNHLYKQISNSTSGGSSNDNAYFGYSTPWGYFDFNRFHCHFSPRDWQRLINNNWGFRPKRLNFKLFNIQVKEVTDNNGVKTIANNLTSTVQVFTDSDYQLPYVLGSAHEGCLPPFPADVFMIPQYGYLTLNDGSQAVGRSSFYCLEYFPSQMLRTGNNFQFSYEFENVPFHSSYAHSQSLDRLMNPLIDQYLYYLSKTINGSGQNQQTLKFSVAGPSNMAVQGRNYIPGPSYRQQRVSTTVTQNNNSEIAWPRASSWALNGRNSLMNPGPAMASHKEGEDRFFPLSGSLIFGKQGTGRDNVDADKVMITNEEEIKTTNPVATESYGQVATNHQSAQGGGGSGGGGSGGGGSGGGGSVSVNFINKESYLQIPSAKVRPQTNITLQIATDEDSGILLYKGDKDHIAVELYRGRVRASYDTGSHPASAIYSVETINDGNFHIVELLALDQSLSLSVDGGNPKIITNLSKQSTLNFDSPLYVGGMPGKSNVASLRQAPGQNGTSFHGCIRNLYINSELQDFQKVPMQTGILPGGGGGSGGGGSAQAQTGWVQNQGILPGMVWQDRDVYLQGPIWAKIPHTDGNFHPSPLMGGFGMKHPPPQILIKNTPVPADPPTAFNKDKLNSFITQYSTGQVSVEIEWELQKENSKRWNPEIQYTSNYCKSNNVEFAVNTEGVYSEPRPIGTRYLTRNL

SEQ ID NO: 79 - protein, 939 aa, Artificial Sequence; identical to SEQ ID NO: 78
  LBV97

SEQ ID NO: 80 - protein, 939 aa, Artificial Sequence
  LBV98
MAADGYLPDWLEDNLSEGIREWWALKPGAPQPKANQQHQDNARGLVLPGYKYLGPGNGLDKGEPVNAADAAALEHDKAYDQQLKAGDNPYLKYNHADAEFQERLKEDTSFGGNLGRAVFQAKKRLLEPLGLVEEAAKTAPGKKRPVEQSPQEPDSSAGIGKSGAQPAKKRLNFGQTGDTESVPDPQPIGEPPAAPSGVGSLTMASGGGAPVADNNEGADGVGSSSGNWHCDSQWLGDRVITTSTRTWALPTYNNHLYKQISNSTSGGSSNDNAYFGYSTPWGYFDFNRFHCHFSPRDWQRLINNNWGFRPKRLNFKLFNIQVKEVTDNNGVKTIANNLTSTVQVFTDSDYQLPYVLGSAHEGCLPPFPADVFMIPQYGYLTLNDGSQAVGRSSFYCLEYFPSQMLRTGNNFQFSYEFENVPFHSSYAHSQSLDRLMNPLIDQYLYYLSKTINGSGQNQQTLKFSVAGPSNMAVQGRNYIPGPSYRQQRVSTTVTQNNNSEFAWPGASSWALNGRNSLMNPGPAMASHKEGEDRFFPLSGSLIFGKQGTGRDNVDADKVMITNEEEIKTTNPVATESYGQVATNHQSAQGGGGSGGGGSGGGGSGGGGSVSVNFINKESYLQIPSAKVRPQTNITLQIATDEDSGILLYKGDKDHIAVELYRGRVRASYDTGSHPASAIYSVETINDGNFHIVELLALDQSLSLSVDGGNPKIITNLSKQSTLNFDSPLYVGGMPGKSNVASLRQAPGQNGTSFHGCIRNLYINSELQDFQKVPMQTGILPGGGGGSGGGGSAQAQTGWVQNQGILPGMVWQDRDVYLQGPIWAKIPHTDGNFHPSPLMGGFGMKHPPPQILIKNTPVPADPPTAFNKDKLNSFITQYSTGQVSVEIEWELQKENSKRWNPEIQYTSNYYKSNNVEFAVNTEGVYSEPRPIGTRYLTRNL

SEQ ID NO: 81 - protein, 940 aa, Artificial Sequence
  LBV99
MAADGYLPDWLEDNLSEGIREWWDLKPGAPKPKANQQKQDNGRGLVLPGYKYLGPFNGLDKGEPVNAADAAALEHDKAYDQQLQAGDNPYLRYNHADAEFQERLQEDTSFGGNLGRAVFQAKKRVLEPLGLVESPVKTAPGKKRPVEPSPQRSPDSSTGIGKKGQQPAKKRLNFGQTGDSESVPDPQPIGEPPAGPSGLGSGTMAAGGGAPMADNNEGADGVGSSSGNWHCDSTWLGDRVITTSTRTWALPTYNNHLYKQISNGTSGGSTNDNTYFGYSTPWGYFDFNRFHCHFSPRDWQRLINNNWGFRPKRLNFKLFNIQVKEVTQNEGTKTIANNLTSTIQVFTDSEYQLPYVLGSAHQGCLPPFPADVFMIPQYGYLTLNNGSQAVGRSSFYCLEYFPSQMLRTGNNFEFSYNFEDVPFHSSYAHSQSLDRLMNPLIDQYLYYLSRTQSTGGTAGTQQLLFSQAGPNNMSAQAKNWLPGPCYRQQRVSTTLSQNNNSNIAWTRATKYHLNGRDSLVNPGVAMATHKDDEERFFPSSGVLMFGKQGAGKDNVDYSSVMLTSEEEIKTTNPVATEQYGVVADNLQQQGGGGSGGGGSGGGGSGGGGSVSVNFINKESYLQIPSAKVRPQTNITLQIATDEDSGILLYKGDKDHIAVELYRGRVRASYDTGSHPASAIYSVETINDGNFHIVELLALDQSLSLSVDGGNPKIITNLSKQSTLNFDSPLYVGGMPGKSNVASLRQAPGQNGTSFHGCIRNLYINSELQDFQKVPMQTGILPGGGGGSGGGGSAAPIVGAVNSQGALPGMVWQNRDVYLQGPIWAKIPHTDGNFHPSPLMGGFGLKHPPPQILIKNTPVPADPPTTFNQAKLASFITQYSTGQVSVEIEWELQKENSKRWNPEIQYTSNYCKSTNVDFAVNTEGTYSEPRPIGTRYLTRNL

SEQ ID NO: 82 - protein, 940 aa, Artificial Sequence; identical to SEQ ID NO: 81
  LBV100

SEQ ID NO: 83 - protein, 743 aa, Artificial Sequence
  LBV101
MAADGYLPDWLEDNLSEGIREWWALKPGAPQPKANQQHQDNARGLVLPGYKYLGPGNGLDKGEPVNAADAAALEHDKAYDQQLKAGDNPYLKYNHADAEFQERLKEDTSFGGNLGRAVFQAKKRLLEPLGLVEEAAKTAPGKKRPVEQSPQEPDSSAGIGKSGAQPAKKRLNFGQTGDTESVPDPQPIGEPPAAPSGVGSLTMASGGGAPVADNNEGADGVGSSSGNWHCDSQWLGDRVITTSTRTWALPTYNNHLYKQISNSTSGGSSNDNAYFGYSTPWGYFDFNRFHCHFSPRDWQRLINNNWGFRPKRLNFKLFNIQVKEVTDNNGVKTIANNLTSTVQVFTDSDYQLPYVLGSAHEGCLPPFPADVFMIPQYGYLTLNDGSQAVGRSSFYCLEYFPSQMLRTGNNFQFSYEFENVPFHSSYAHSQSLDRLMNPLIDQYLYYLSKTIDGAATKNQTLKFSVAGPSNMAVQGRNYIPGPSYRQQRVSTTVTQNNNSEFAWPGASSWALNGRNSLMNPGPAMASHKEGEDRFFPLSGSLIFGKQGTGRDNVDADKVMITNEEEIKTTNPVATESYGQVATNHQSAQRGDYVGLAQAQTGWVQNQGILPGMVWQDRDVYLQGPIWAKIPHTDGNFHPSPLMGGFGMKHPPPQILIKNTPVPADPPTAFNKDKLNSFITQYSTGQVSVEIEWELQKENSKRWNPEIQYTSNYYKSNNVEFAVNTEGVYSEPRPIGTRYLTRNL

SEQ ID NO: 84 - protein, 601 aa, Artificial Sequence
  LBV29
TAPGKKRPVEPSPQRSPDSSTGIGKKGQQPAKKRLNFGQTGDSESVPDPQPIGEPPAGPSGLGSGTMAAGGGAPMADNNEGADGVGSSSGNWHCDSTWLGDRVITTSTRTWALPTYNNHLYKQISNGTSGGSTNDNTYFGYSTPWGYFDFNRFHCHFSPRDWQRLINNNWGFRPKRLNFKLFNIQVKEVTQNEGTKTIANNLTSTIQVFTDSEYQLPYVLGSAHQGCLPPFPADVFMIPQYGYLTLNNGSQAVGRSSFYCLEYFPSQMLRTGNNFEFSYNFEDVPFHSSYAHSQSLDRLMNPLIDQYLYYLSRTQSTGGTAGTQQLLFSQAGPNNMSAQAKNWLPGPCYRQQRVSTTLSQNNNSNFAWTGATKYHLNGRDSLVNPGVAMATHKDDEERFFPSSGVLMFGKQGAGKDNVDYSSVMLTSEEEIKTTNPVATEQYGVVADNLQQQNAAPIVGAVNSQGALPGMVWQNRDVYLQGPIWAKIPHTDGNFHPSPLMGGFGLKHPPPQILIKNTPVPADPPTTFNQAKLASFITQYSTGQVSVEIEWELQKENSKRWNPEIQYTSNYYKSTNVDFAVNTEGTYSEPRPIGTRYLTRNL

SEQ ID NO: 85 - protein, 612 aa, Artificial Sequence
  LBV30
TAPGKKRPVEPSPQRSPDSSTGIGKKGQQPAKKRLNFGQTGDSESVPDPQPIGEPPAGPSGLGSGTMAAGGGAPMADNNEGADGVGSSSGNWHCDSTWLGDRVITTSTRTWALPTYNNHLYKQISNGTSGGSTNDNTYFGYSTPWGYFDFNRFHCHFSPRDWQRLINNNWGFRPKRLNFKLFNIQVKEVTQNEGTKTIANNLTSTIQVFTDSEYQLPYVLGSAHQGCLPPFPADVFMIPQYGYLTLNNGSQAVGRSSFYCLEYFPSQMLRTGNNFEFSYNFEDVPFHSSYAHSQSLDRLMNPLIDQYLYYLSRTQSTGGTAGTQQLLFSQAGPNNMSAQAKNWLPGPCYRQQRVSTTLSQNNNSNFAWTGATKYHLNGRDSLVNPGVAMATHKDDEERFFPSSGVLMFGKQGAGKDNVDYSSVMLTSEEEIKTTNPVATEQYGVVADNLQQQGSGRGDLGLSGGAAPIVGAVNSQGALPGMVWQNRDVYLQGPIWAKIPHTDGNFHPSPLMGGFGLKHPPPQILIKNTPVPADPPTTFNQAKLASFITQYSTGQVSVEIEWELQKENSKRWNPEIQYTSNYYKSTNVDFAVNTEGTYSEPRPIGTRYLTRNL

SEQ ID NO: 86 - protein, 592 aa, Artificial Sequence
  LBV31
TAAKGERIDDHYPKKKKARIEETEAGTSGAQQLQIPAQPASSLGADTMSAGGGSPLGDNNQGADGVGNASGDWHCDSTWMGDRVITKSTRTWVLPSYNNHQYLEIHSGSVDGSNANAYFGYSTPWGYFDFNRFHSHWSPRDWQRLVNNYWGFRPRSLKVKIFNIQVKEVTTQDGTTTIANNLTSTVQVFTDNDYQLPYVIGNGTEGCLPAFPPQVFTLPQYGYATLNRNNTDDPTERSSFFCLEYFPSKMLRTGNNFEFTYSFEEVPFHCSFAPSQNLFKLANPLVDQYLYRFVSTDTSGNLQFQKNLKARYANTYKNWFPGPMCRTQGWYTSAGTYNNKGVANFDTSNKMELEGASYQVNPQPNGMTNTLQDSNKYALENTMIFNAQNAPPGTTSLYQENNLLITSESETQPVNRLAYNTGGQVSNNNQNSNGSGRGDLGLSGGTHPTVGVYNHQEVLPGSVWMDRDVYLQGPIWAKIPETGAHFHPSPAMGGFGLKHPPPMMLIKNTPVPSNVAAFSDVPVKSFITQYSTGQVTVEIEWELKKENSKRWNPEIQYTNNYNNPTFVDFAPDTSGEYRTTRAIGTRYLTRPL

SEQ ID NO: 87 - protein, 592 aa, Artificial Sequence; identical to SEQ ID NO: 86
  LBV32

SEQ ID NO: 88 - protein, 592 aa, Artificial Sequence
  LBV33
TAAGKKRIDDHYPKKKKARIEETEAGTSGAQQLQIPAQPASSLGADTMSAGGGSPLGDNNQGADGVGNASGDWHCDSTWMGDRVITKSTRTWVLPSYNNHQYLEIHSGSVDGSNANAYFGYSTPWGYFDFNRFHSHWSPRDWQRLVNNYWGFRPRSLKVKIFNIQVKEVTTQDGTTTIANNLTSTVQVFTDNDYQLPYVIGNGTEGCLPAFPPQVFTLPQYGYATLNRNNTDDPTERSSFFCLEYFPSKMLRTGNNFEFTYSFEEVPFHCSFAPSQNLFKLANPLVDQYLYRFVSTDTSGNLQFQKNLKARYANTYKNWFPGPMCRTQGWYTSAGTYNNKGVANFDTSNKMELEGASYQVNPQPNGMTNTLQDSNKYALENTMIFNAQNAPPGTTSLYQENNLLITSESETQPVNRLAYNTGGQVSNNNQNSNGSGRGDLGLSGGTHPTVGVYNHQEVLPGSVWMDRDVYLQGPIWAKIPETGAHFHPSPAMGGFGLKHPPPMMLIKNTPVPSNVAAFSDVPVKSFITQYSTGQVTVEIEWELKKENSKRWNPEIQYTNNYNNPTFVDFAPDTSGEYRTTRAIGTRYLTRPL

SEQ ID NO: 89 - protein, 592 aa, Artificial Sequence; identical to SEQ ID NO: 86
  LBV34

SEQ ID NO: 90 - protein, 592 aa, Artificial Sequence; identical to SEQ ID NO: 86
  LBV35

SEQ ID NO: 91 - protein, 611 aa, Artificial Sequence
  LBV41
TAPGKKRPVEQSPQEPDSSAGIGKSGAQPAKKRLNFGQTGDTESVPDPQPIGEPPAAPSGVGSLTMASGGGAPVADNNEGADGVGSSSGNWHCDSQWLGDRVITTSTRTWALPTYNNHLYKQISNSTSGGSSNDNAYFGYSTPWGYFDFNRFHCHFSPRDWQRLINNNWGFRPKRLNFKLFNIQVKEVTDNNGVKTIANNLTSTVQVFTDSDYQLPYVLGSAHEGCLPPFPADVFMIPQYGYLTLNDGSQAVGRSSFYCLEYFPSQMLRTGNNFQFSYEFENVPFHSSYAHSQSLDRLMNPLIDQYLYYLSKTINGSGQNQQTLKFSVAGPSNMAVQGRNYIPGPSYRQQRVSTTVTQNNNSEFAWPGASSWALNGRNSLMNPGPAMASHKEGEDRFFPLSGSLIFGKQGTGRDNVDADKVMITNEEEIKTTNPVATESYGQVATNHQSAQGSGRGDLGLSGGAQAQTGWVQNQGILPGMVWQDRDVYLQGPIWAKIPHTDGNFHPSPLMGGFGMKHPPPQILIKNTPVPADPPTAFNKDKLNSFITQYSTGQVSVEIEWELQKENSKRWNPEIQYTSNYYKSNNVEFAVNTEGVYSEPRPIGTRYLTRNL

SEQ ID NO: 92 - protein, 611 aa, Artificial Sequence; identical to SEQ ID NO: 91
  LBV42

SEQ ID NO: 93 - protein, 611 aa, Artificial Sequence; identical to SEQ ID NO: 91
  LBV43

SEQ ID NO: 94 - protein, 612 aa, Artificial Sequence; identical to SEQ ID NO: 85
  LBV44

SEQ ID NO: 95 - protein, 612 aa, Artificial Sequence; identical to SEQ ID NO: 85
  LBV45

SEQ ID NO: 96 - protein, 612 aa, Artificial Sequence; identical to SEQ ID NO: 85
  LBV46

SEQ ID NO: 97 - protein, 612 aa, Artificial Sequence; identical to SEQ ID NO: 85
  LBV47

SEQ ID NO: 98 - protein, 592 aa, Artificial Sequence; identical to SEQ ID NO: 86
  LBV48

SEQ ID NO: 99 - protein, 588 aa, Artificial Sequence
  LBV49
TAAKGERIDDHYPKKKKARIEETEAGTSGAQQLQIPAQPASSLGADTMSAGGGSPLGDNNQGADGVGNASGDWHCDSTWMGDRVITKSTRTWVLPSYNNHQYLEIHSGSVDGSNANAYFGYSTPWGYFDFNRFHSHWSPRDWQRLVNNYWGFRPRSLKVKIFNIQVKEVTTQDGTTTIANNLTSTVQVFTDNDYQLPYVIGNGTEGCLPAFPPQVFTLPQYGYATLNRNNTDDPTERSSFFCLEYFPSKMLRTGNNFEFTYSFEEVPFHCSFAPSQNLFKLANPLVDQYLYRFVSTDTSGNLQFQKNLKARYANTYKNWFPGPMCRTQGWYTSAGTYNNKGVANFDTSNKMELEGASYQVNPQPNGMTNTLQDSNKYALENTMIFNAQNAPPGTTSLYQENNLLITSESETQPVNRLAYNTGGQVSNNNQNSNSRGDYNSLTHPTVGVYNHQEVLPGSVWMDRDVYLQGPIWAKIPETGAHFHPSPAMGGFGLKHPPPMMLIKNTPVPSNVAAFSDVPVKSFITQYSTGQVTVEIEWELKKENSKRWNPEIQYTNNYNNPTFVDFAPDTSGEYRTTRAIGTRYLTRPL

SEQ ID NO: 100 - protein, 588 aa, Artificial Sequence
  LBV50
TAAGKKRIDDHYPKKKKARIEETEAGTSGAQQLQIPAQPASSLGADTMSAGGGSPLGDNNQGADGVGNASGDWHCDSTWMGDRVITKSTRTWVLPSYNNHQYLEIHSGSVDGSNANAYFGYSTPWGYFDFNRFHSHWSPRDWQRLVNNYWGFRPRSLKVKIFNIQVKEVTTQDGTTTIANNLTSTVQVFTDNDYQLPYVIGNGTEGCLPAFPPQVFTLPQYGYATLNRNNTDDPTERSSFFCLEYFPSKMLRTGNNFEFTYSFEEVPFHCSFAPSQNLFKLANPLVDQYLYRFVSTDTSGNLQFQKNLKARYANTYKNWFPGPMCRTQGWYTSAGTYNNKGVANFDTSNKMELEGASYQVNPQPNGMTNTLQDSNKYALENTMIFNAQNAPPGTTSLYQENNLLITSESETQPVNRLAYNTGGQVSNNNQNSNSRGDYNSLTHPTVGVYNHQEVLPGSVWMDRDVYLQGPIWAKIPETGAHFHPSPAMGGFGLKHPPPMMLIKNTPVPSNVAAFSDVPVKSFITQYSTGQVTVEIEWELKKENSKRWNPEIQYTNNYNNPTFVDFAPDTSGEYRTTRAIGTRYLTRPL

SEQ ID NO: 101 - protein, 599 aa, Artificial Sequence
  LBV54
TAPGKKRPVEQSPQEPDSSAGIGKSGAQPAKKRLNFGQTGDTESVPDPQPIGEPPAAPSGVGSLTMASGGGAPVADNNEGADGVGSSSGNWHCDSQWLGDRVITTSTRTWALPTYNNHLYKQISNSTSGGSSNDNAYFGYSTPWGYFDFNRFHCHFSPRDWQRLINNNWGFRPKRLNFKLFNIQVKEVTDNNGVKTIANNLTSTVQVFTDSDYQLPYVLGSAHEGCLPPFPADVFMIPQYGYLTLNDGSQAVGRSSFYCLEYFPSQMLRTGNNFQFSYEFENVPFHSSYAHSQSLDRLMNPLIDQYLYYLSKTINGSGQNQQTLKFSVAGPSNMAVQGRNYIPGPSYRQQRVSTTVTQNNNSEFAWPGASSWALNGRNSLMNPGPAMASHKEGEDRFFPLSGSLIFGKQGTGRDNVDADKVMITNEEEIKTTNPVATESYGQVATNHQSAQAQAQTGWVQNQGILPGMVWQDRDVYLQGPIWAKIPHTDGNFHPSPLMGGFGMKHPPPQILIKNTPVPADPPTAFNKDKLNSFITQYSTGQVSVEIEWELQKENSKRWNPEIQYTSNYYKSNNVEFAVNTEGVYSEPRPIGTRYLTRNL

SEQ ID NO: 102 - protein, 599 aa, Artificial Sequence; identical to SEQ ID NO: 101
  LBV55

SEQ ID NO: 103 - protein, 599 aa, Artificial Sequence; identical to SEQ ID NO: 101
  LBV56

SEQ ID NO: 104 - protein, 599 aa, Artificial Sequence; identical to SEQ ID NO: 101
  LBV57

SEQ ID NO: 105 - protein, 599 aa, Artificial Sequence; identical to SEQ ID NO: 101
  LBV58

SEQ ID NO: 106 - protein, 580 aa, Artificial Sequence
  LBV59
TAAKGERIDDHYPKKKKARIEETEAGTSGAQQLQIPAQPASSLGADTMSAGGGSPLGDNNQGADGVGNASGDWHCDSTWMGDRVITKSTRTWVLPSYNNHQYLEIHSGSVDGSNANAYFGYSTPWGYFDFNRFHSHWSPRDWQRLVNNYWGFRPRSLKVKIFNIQVKEVTTQDGTTTIANNLTSTVQVFTDNDYQLPYVIGNGTEGCLPAFPPQVFTLPQYGYATLNRNNTDDPTERSSFFCLEYFPSKMLRTGNNFEFTYSFEEVPFHCSFAPSQNLFKLANPLVDQYLYRFVSTDTSGNLQFQKNLKARYANTYKNWFPGPMCRTQGWYTSAGTYNNKGVANFDTSNKMELEGASYQVNPQPNGMTNTLQDSNKYALENTMIFNAQNAPPGTTSLYQENNLLITSESETQPVNRLAYNTGGQVSNNNQNSNTHPTVGVYNHQEVLPGSVWMDRDVYLQGPIWAKIPETGAHFHPSPAMGGFGLKHPPPMMLIKNTPVPSNVAAFSDVPVKSFITQYSTGQVTVEIEWELKKENSKRWNPEIQYTNNYNNPTFVDFAPDTSGEYRTTRAIGTRYLTRPL

SEQ ID NO: 107 - protein, 580 aa, Artificial Sequence; identical to SEQ ID NO: 106
  LBV60

SEQ ID NO: 108 - protein, 580 aa, Artificial Sequence; identical to SEQ ID NO: 106
  LBV61

SEQ ID NO: 109 - protein, 580 aa, Artificial Sequence; identical to SEQ ID NO: 106
  LBV62

SEQ ID NO: 110 - protein, 580 aa, Artificial Sequence; identical to SEQ ID NO: 106
  LBV63

SEQ ID NO: 111 - protein, 606 aa, Artificial Sequence
  LBV64
TAPGKKRPVEQSPQEPDSSAGIGKSGAQPAKKRLNFGQTGDTESVPDPQPIGEPPAAPSGVGSLTMASGGGAPVADNNEGADGVGSSSGNWHCDSQWLGDRVITTSTRTWALPTYNNHLYKQISNSTSGGSSNDNAYFGYSTPWGYFDFNRFHCHFSPRDWQRLINNNWGFRPKRLNFKLFNIQVKEVTDNNGVKTIANNLTSTVQVFTDSDYQLPYVLGSAHEGCLPPFPADVFMIPQYGYLTLNDGSQAVGRSSFYCLEYFPSQMLRTGNNFQFSYEFENVPFHSSYAHSQSLDRLMNPLIDQYLYYLSKTINGSGQNQQTLKFSVAGPSNMAVQGRNYIPGPSYRQQRVSTTVTQNNNSEFAWPGASSWALNGRNSLMNPGPAMASHKEGEDRFFPLSGSLIFGKQGTGRDNVDADKVMITNEEEIKTTNPVATESYGQVATNHQSAQRGDLSTPAQAQTGWVQNQGILPGMVWQDRDVYLQGPIWAKIPHTDGNFHPSPLMGGFGMKHPPPQILIKNTPVPADPPTAFNKDKLNSFITQYSTGQVSVEIEWELQKENSKRWNPEIQYTSNYYKSNNVEFAVNTEGVYSEPRPIGTRYLTRNL

SEQ ID NO: 112 - protein, 606 aa, Artificial Sequence; identical to SEQ ID NO: 111
  LBV65

SEQ ID NO: 113 - protein, 606 aa, Artificial Sequence; identical to SEQ ID NO: 111
  LBV66

SEQ ID NO: 114 - protein, 606 aa, Artificial Sequence; identical to SEQ ID NO: 111
  LBV67

SEQ ID NO: 115 - protein, 606 aa, Artificial Sequence; identical to SEQ ID NO: 111
  LBV68

SEQ ID NO: 116 - protein, 592 aa, Artificial Sequence
  LBV69
TAAKGERIDDHYPKKKKARIEETEAGTSGAQQLQIPAQPASSLGADTMSAGGGSPLGDNNQGADGVGNASGDWHCDSTWMGDRVITKSTRTWVLPSYNNHQYLEIHSGSVDGSNANAYFGYSTPWGYFDFNRFHSHWSPRDWQRLVNNYWGFRPRSLKVKIFNIQVKEVTTQDGTTTIANNLTSTVQVFTDNDYQLPYVIGNGTEGCLPAFPPQVFTLPQYGYATLNRNNTDDPTERSSFFCLEYFPSKMLRTGNNFEFTYSFEEVPFHCSFAPSQNLFKLANPLVDQYLYRFVSTDTSGNLQFQKNLKARYANTYKNWFPGPMCRTQGWYTSAGTYNNKGVANFDTSNKMELEGASYQVNPQPNGMTNTLQDSNKYALENTMIFNAQNAPPGTTSLYQENNLLITSESETQPVNRLAYNTGGQVSNNNQNSNGSGRGDLSTPGGTHPTVGVYNHQEVLPGSVWMDRDVYLQGPIWAKIPETGAHFHPSPAMGGFGLKHPPPMMLIKNTPVPSNVAAFSDVPVKSFITQYSTGQVTVEIEWELKKENSKRWNPEIQYTNNYNNPTFVDFAPDTSGEYRTTRAIGTRYLTRPL

SEQ ID NO: 117 - protein, 592 aa, Artificial Sequence; identical to SEQ ID NO: 116
  LBV70

SEQ ID NO: 118 - protein, 592 aa, Artificial Sequence; identical to SEQ ID NO: 116
  LBV71

SEQ ID NO: 119 - protein, 592 aa, Artificial Sequence; identical to SEQ ID NO: 116
  LBV72

SEQ ID NO: 120 - protein, 592 aa, Artificial Sequence; identical to SEQ ID NO: 116
  LBV73

SEQ ID NO: 121 - protein, 592 aa, Artificial Sequence; identical to SEQ ID NO: 116
  LBV76

SEQ ID NO: 122 - protein, 599 aa, Artificial Sequence
  LBV91
TAPGKKRPVEQSPQEPDSSAGIGKSGAQPAKKRLNFGQTGDTESVPDPQPIGEPPAAPSGVGSLTMASGGGAPVADNNEGADGVGSSSGNWHCDSQWLGDRVITTSTRTWALPTYNNHLYKQISNSTSGGSSNDNAYFGYSTPWGYFDFNRFHCHFSPRDWQRLINNNWGFRPKRLNFKLFNIQVKEVTDNNGVKTIANNLTSTVQVFTDSDYQLPYVLGSAHEGCLPPFPADVFMIPQYGYLTLNDGSQAVGRSSFYCLEYFPSQMLRTGNNFQFSYEFENVPFHSSYAHSQSLDRLMNPLIDQYLYYLSKTINGSGQNQQTLKFSVAGPSNMAVQGRNYIPGPSYRQQRVSTTVTQNNNSEIAWPRASSWALNGRNSLMNPGPAMASHKEGEDRFFPLSGSLIFGKQGTGRDNVDADKVMITNEEEIKTTNPVATESYGQVATNHQSAQAQAQTGWVQNQGILPGMVWQDRDVYLQGPIWAKIPHTDGNFHPSPLMGGFGMKHPPPQILIKNTPVPADPPTAFNKDKLNSFITQYSTGQVSVEIEWELQKENSKRWNPEIQYTSNYCKSNNVEFAVNTEGVYSEPRPIGTRYLTRNL

SEQ ID NO: 123 - protein, 612 aa, Artificial Sequence
  LBV92
TAPGKKRPVEPSPQRSPDSSTGIGKKGQQPAKKRLNFGQTGDSESVPDPQPIGEPPAGPSGLGSGTMAAGGGAPMADNNEGADGVGSSSGNWHCDSTWLGDRVITTSTRTWALPTYNNHLYKQISNGTSGGSTNDNTYFGYSTPWGYFDFNRFHCHFSPRDWQRLINNNWGFRPKRLNFKLFNIQVKEVTQNEGTKTIANNLTSTIQVFTDSEYQLPYVLGSAHQGCLPPFPADVFMIPQYGYLTLNNGSQAVGRSSFYCLEYFPSQMLRTGNNFEFSYNFEDVPFHSSYAHSQSLDRLMNPLIDQYLYYLSRTQSTGGTAGTQQLLFSQAGPNNMSAQAKNWLPGPCYRQQRVSTTLSQNNNSNIAWTRATKYHLNGRDSLVNPGVAMATHKDDEERFFPSSGVLMFGKQGAGKDNVDYSSVMLTSEEEIKTTNPVATEQYGVVADNLQQQGSGRGDLGLSGGAAPIVGAVNSQGALPGMVWQNRDVYLQGPIWAKIPHTDGNFHPSPLMGGFGLKHPPPQILIKNTPVPADPPTTFNQAKLASFITQYSTGQVSVEIEWELQKENSKRWNPEIQYTSNYCKSTNVDFAVNTEGTYSEPRPIGTRYLTRNL

SEQ ID NO: 124 - protein, 607 aa, Artificial Sequence
  LBV93
TAPGKKRPVEPSPQRSPDSSTGIGKKGQQPAKKRLNFGQTGDSESVPDPQPIGEPPAGPSGLGSGTMAAGGGAPMADNNEGADGVGSSSGNWHCDSTWLGDRVITTSTRTWALPTYNNHLYKQISNGTSGGSTNDNTYFGYSTPWGYFDFNRFHCHFSPRDWQRLINNNWGFRPKRLNFKLFNIQVKEVTQNEGTKTIANNLTSTIQVFTDSEYQLPYVLGSAHQGCLPPFPADVFMIPQYGYLTLNNGSQAVGRSSFYCLEYFPSQMLRTGNNFEFSYNFEDVPFHSSYAHSQSLDRLMNPLIDQYLYYLSRTQSTGGTAGTQQLLFSQAGPNNMSAQAKNWLPGPCYRQQRVSTTLSQNNNSNIAWTRATKYHLNGRDSLVNPGVAMATHKDDEERFFPSSGVLMFGKQGAGKDNVDYSSVMLTSEEEIKTTNPVATEQYGVVADNLQQQRGDYVGLAAPIVGAVNSQGALPGMVWQNRDVYLQGPIWAKIPHTDGNFHPSPLMGGFGLKHPPPQILIKNTPVPADPPTTFNQAKLASFITQYSTGQVSVEIEWELQKENSKRWNPEIQYTSNYCKSTNVDFAVNTEGTYSEPRPIGTRYLTRNL

SEQ ID NO: 125 - protein, 607 aa, Artificial Sequence; identical to SEQ ID NO: 124
  LBV94

SEQ ID NO: 126 - protein, 607 aa, Artificial Sequence; identical to SEQ ID NO: 124
  LBV95

SEQ ID NO: 127 - protein, 599 aa, Artificial Sequence; identical to SEQ ID NO: 122
  LBV96

SEQ ID NO: 128 - protein, 606 aa, Artificial Sequence
  LBV97
TAPGKKRPVEQSPQEPDSSAGIGKSGAQPAKKRLNFGQTGDTESVPDPQPIGEPPAAPSGVGSLTMASGGGAPVADNNEGADGVGSSSGNWHCDSQWLGDRVITTSTRTWALPTYNNHLYKQISNSTSGGSSNDNAYFGYSTPWGYFDFNRFHCHFSPRDWQRLINNNWGFRPKRLNFKLFNIQVKEVTDNNGVKTIANNLTSTVQVFTDSDYQLPYVLGSAHEGCLPPFPADVFMIPQYGYLTLNDGSQAVGRSSFYCLEYFPSQMLRTGNNFQFSYEFENVPFHSSYAHSQSLDRLMNPLIDQYLYYLSKTINGSGQNQQTLKFSVAGPSNMAVQGRNYIPGPSYRQQRVSTTVTQNNNSEIAWPRASSWALNGRNSLMNPGPAMASHKEGEDRFFPLSGSLIFGKQGTGRDNVDADKVMITNEEEIKTTNPVATESYGQVATNHQSAQRGDYVGLAQAQTGWVQNQGILPGMVWQDRDVYLQGPIWAKIPHTDGNFHPSPLMGGFGMKHPPPQILIKNTPVPADPPTAFNKDKLNSFITQYSTGQVSVEIEWELQKENSKRWNPEIQYTSNYCKSNNVEFAVNTEGVYSEPRPIGTRYLTRNL

SEQ ID NO: 129 - protein, 606 aa, Artificial Sequence
  LBV98
TAPGKKRPVEQSPQEPDSSAGIGKSGAQPAKKRLNFGQTGDTESVPDPQPIGEPPAAPSGVGSLTMASGGGAPVADNNEGADGVGSSSGNWHCDSQWLGDRVITTSTRTWALPTYNNHLYKQISNSTSGGSSNDNAYFGYSTPWGYFDFNRFHCHFSPRDWQRLINNNWGFRPKRLNFKLFNIQVKEVTDNNGVKTIANNLTSTVQVFTDSDYQLPYVLGSAHEGCLPPFPADVFMIPQYGYLTLNDGSQAVGRSSFYCLEYFPSQMLRTGNNFQFSYEFENVPFHSSYAHSQSLDRLMNPLIDQYLYYLSKTINGSGQNQQTLKFSVAGPSNMAVQGRNYIPGPSYRQQRVSTTVTQNNNSEFAWPGASSWALNGRNSLMNPGPAMASHKEGEDRFFPLSGSLIFGKQGTGRDNVDADKVMITNEEEIKTTNPVATESYGQVATNHQSAQRGDYVGLAQAQTGWVQNQGILPGMVWQDRDVYLQGPIWAKIPHTDGNFHPSPLMGGFGMKHPPPQILIKNTPVPADPPTAFNKDKLNSFITQYSTGQVSVEIEWELQKENSKRWNPEIQYTSNYYKSNNVEFAVNTEGVYSEPRPIGTRYLTRNL

SEQ ID NO: 130 - protein, 600 aa, Artificial Sequence
  LBV99
TAPGKKRPVEPSPQRSPDSSTGIGKKGQQPAKKRLNFGQTGDSESVPDPQPIGEPPAGPSGLGSGTMAAGGGAPMADNNEGADGVGSSSGNWHCDSTWLGDRVITTSTRTWALPTYNNHLYKQISNGTSGGSTNDNTYFGYSTPWGYFDFNRFHCHFSPRDWQRLINNNWGFRPKRLNFKLFNIQVKEVTQNEGTKTIANNLTSTIQVFTDSEYQLPYVLGSAHQGCLPPFPADVFMIPQYGYLTLNNGSQAVGRSSFYCLEYFPSQMLRTGNNFEFSYNFEDVPFHSSYAHSQSLDRLMNPLIDQYLYYLSRTQSTGGTAGTQQLLFSQAGPNNMSAQAKNWLPGPCYRQQRVSTTLSQNNNSNIAWTRATKYHLNGRDSLVNPGVAMATHKDDEERFFPSSGVLMFGKQGAGKDNVDYSSVMLTSEEEIKTTNPVATEQYGVVADNLQQQAAPIVGAVNSQGALPGMVWQNRDVYLQGPIWAKIPHTDGNFHPSPLMGGFGLKHPPPQILIKNTPVPADPPTTFNQAKLASFITQYSTGQVSVEIEWELQKENSKRWNPEIQYTSNYCKSTNVDFAVNTEGTYSEPRPIGTRYLTRNL

SEQ ID NO: 131 - protein, 607 aa, Artificial Sequence; identical to SEQ ID NO: 124
  LBV100

SEQ ID NO: 132 - protein, 743 aa, Artificial Sequence
  LBV102
MAADGYLPDWLEDNLSEGIREWWALKPGAPQPKANQQHQDNARGLVLPGYKYLGPGNGLDKGEPVNAADAAALEHDKAYDQQLKAGDNPYLKYNHADAEFQERLKEDTSFGGNLGRAVFQAKKRLLEPLGLVEEAAKTAPGKKRPVEQSPQEPDSSAGIGKSGAQPAKKRLNFGQTGDTESVPDPQPIGEPPAAPSGVGSLTMASGGGAPVADNNEGADGVGSSSGNWHCDSQWLGDRVITTSTRTWALPTYNNHLYKQISNSTSGGSSNDNAYFGYSTPWGYFDFNRFHCHFSPRDWQRLINNNWGFRPKRLNFKLFNIQVKEVTDNNGVKTIANNLTSTVQVFTDSDYQLPYVLGSAHEGCLPPFPADVFMIPQYGYLTLNDGSQAVGRSSFYCLEYFPSQMLRTGNNFQFSYEFENVPFHSSYAHSQSLDRLMNPLIDQYLYYLSKTITTGGHSSQTLKFSVAGPSNMAVQGRNYIPGPSYRQQRVSTTVTQNNNSEFAWPGASSWALNGRNSLMNPGPAMASHKEGEDRFFPLSGSLIFGKQGTGRDNVDADKVMITNEEEIKTTNPVATESYGQVATNHQSAQRGDYVGLAQAQTGWVQNQGILPGMVWQDRDVYLQGPIWAKIPHTDGNFHPSPLMGGFGMKHPPPQILIKNTPVPADPPTAFNKDKLNSFITQYSTGQVSVEIEWELQKENSKRWNPEIQYTSNYYKSNNVEFAVNTEGVYSEPRPIGTRYLTRNL

SEQ ID NO: 133 - DNA, 2592 bp, Artificial Sequence
  LBV29
atggctgccgatggttatcttccggattggctcgaggacaacctctctgagggcattcgcgagtggtgggacttgaaacctggagccccgaaacccaaagccaaccagcaaaagcaggacaacggccggggtctggtgcttcctggctacaagtacctcggacccttcaacggactcgacaagggggagcccgtcaacgcggcggacgcagcggccctcgagcacgacaaggcctacgaccagcagctccaagcgggtgacaatccgtacctgcggtataaccacgccgacgccgagtttcaggagcgtctgcaagaagatacgtcttttgggggcaacctcgggcgagcagtcttccaggccaagaagcgggttctcgaacctctcggtctggttgagtctcctgtgaagacggctcctggaaagaagagaccggtagagccatcaccccagcgttctccagactcctctacgggcatcggcaagaaaggccagcagcccgcgaaaaagagactcaactttgggcagactggcgactcagagtcagtgcccgaccctcaaccaatcggagaaccccccgcaggcccctctggtctgggatctggtacaatggctgcaggcggtggcgctccaatggcagacaataacgaaggcgccgacggagtgggtagttcctcaggaaattggcattgcgattccacatggctgggcgacagagtcatcaccaccagcacccgaacctgggccctccccacctacaacaaccacctctacaagcaaatctccaacgggacttcgggaggaagcaccaacgacaacacctacttcggctacagcaccccctgggggtattttgactttaacagattccactgccacttctcaccacgtgactggcagcgactcatcaacaacaactggggattccggcccaagagactcaacttcaagctcttcaacatccaggtcaaggaggtcacgcagaatgaaggcaccaagaccatcgccaataaccttaccagcacgattcaggtctttacggactcggaataccagctcccgtacgtcctcggctctgcgcaccagggctgcctgcctccgttcccggcggacgtcttcatgattcctcagtacgggtacctgactctgaacaatggcagtcaggccgtgggccgttcctccttctactgcctggagtactttccttctcaaatgctgagaacgggcaacaactttgagttcagctacaactttgaggacgtgccttttcacagcagctacgcgcacagccaaagcctggaccggctgatgaaccccctcatcgaccagtacctgtactacctgtctcggactcagtccacgggaggtaccgcaggaactcagcagttgctattttctcaggccgggcctaataacatgtcggctcaggccaaaaactggctacccgggccctgctaccggcagcaacgcgtctccacgacactgtcgcaaaataacaacagcaactttgcctggaccggtgccaccaagtatcatctgaatggcagagactctctggtaaatcccggtgtcgctatggcaacccacaaggacgacgaagagcgattttttccgtccagcggagtcttaatgtttgggaaacagggagctggaaaagacaacgtggactatagcagcgttatgctaaccagtgaggaagaaattaaaaccaccaacccagtggccacagaacagtacggcgtggtggccgataacctgcaacagcaaggtggtggtggatctggaggtggcgggtctggcggcggaggatctggtgggggaggctccggaggcggaggtagcacccccttttatcctgtggggtacacggttaaacaaccaggcacatgtggcgatggagttcttcagcccggtgaggagtgcgacgatgggaacccagacgtatcagacggctgcatagactgtcacagagcttactgcggggatggataccgacaccagggggtagaagattgcgatggttcagactttggctacctcacttgtgagacgtaccttcccggctcatacggcgatttgcggtgtacgcaatactgtagcattgatagtacgccttgccgctattttaccggcgggggtggtgcagccgctcctattgtaggggccgtcaacagtcaaggagccttacctggcatggtctggcagaaccgggacgtgtacctgcagggtcctatctgggccaagattcctcacacggacggaaactttcatccctcgccgctgatgggaggctttggactgaaacacccgcctcctcagatcctgattaagaatacacctgttcccgcggatcctccaactaccttcaaccaagctaagctggcgtcgttcatcacgcagtacagcaccggacaggtcagcgtggaaattgaatgggagctgcagaaagaaaacagcaaacgctggaacccagagattcaatacacttccaactactacaaatctacaaatgtggactttgctgttaacacagagggcacttattctgagcctcgccccatcggcacccgttacctcacccgtaatctgtaa

SEQ ID NO: 134 - DNA, 2592 bp, Artificial Sequence; identical to SEQ ID NO: 133
  LBV30

SEQ ID NO: 135 - DNA, 2529 bp, Artificial Sequence
  LBV31
atgtcgtttgttgatcaccctccggattggcttgaggagattggtgagggtctaaaggagtttttgggactcgaacctggcccacccaaaccgaagcccaaccagcagaagcaagacgacgcccgtggtcttgtactgcctggatataattacctgggacccggaaacggtctcgaccgcggagaacctgtcaaccgggctgacgaggtcgcgcgagagcacgacatctcgtacaacgagcagctccaggcgggagacaacccctacctcaagtacaaccacgcggacgccgagtttcaggagaagctcgcggacgacacctccttcgggggcaacctcggcaaggcagtctttcaggccaaaaaaagggttctcgaaccttttggcctggttgaggagcctgttaagacggctgctaaaggcgagcggatagacgaccactatcccaaaaagaagaaggctcggatcgaagagaccgaagctggaaccagcggagcccagcagctgcagatcccagcccaaccagcctcaagtttgggagctgatacaatgtctgcgggaggtggcagcccactgggcgacaataaccaaggcgccgatggagtgggcaatgcctcgggagattggcattgcgattccacgtggatgggggaccgagtcatcaccaagtccacccgaacctgggtgctgcccagctacaacaaccatcagtaccttgagatccacagcggttccgtcgacggaagcaacgctaacgcttattttggatacagcaccccctgggggtactttgacttcaaccgcttccacagccactggagcccccgagactggcagcgactcgtcaacaactactggggattcagaccccggtccctcaaggtcaagatctttaacatccaagtcaaggaagtcacgacgcaggacggcaccaccaccatcgccaacaacctcacctccaccgtccaagtgtttacggacaacgactaccagctaccgtacgtcatcggcaacggaacggaggggtgcctgccggccttccctccgcaggtctttacgctgccgcagtacggctacgcgacactgaaccgtaacaacaccgacgatcccaccgagcggagcagtttcttctgcctggaatactttcccagcaagatgctgcggacgggcaacaactttgaattcacctacagcttcgaggaggtgcccttccactgcagcttcgctcccagccagaacctcttcaagctggccaatccgctggtggaccagtacctgtaccgctttgtgagcaccgacacttccggtaacctacagttccaaaagaacttgaaggccagatatgccaacacttacaagaattggtttccggggcccatgtgccggacccagggctggtacacaagcgcgggcacatataacaacaaaggcgttgccaactttgatacttcaaacaagatggaactggagggggctagttaccaagtaaaccctcaaccaaatggaatgacaaacacgcttcaggatagtaacaaatacgcgcttgaaaacaccatgatcttcaacgcacagaacgcccctccgggaacgacctctctgtaccaggagaacaatcttttgataaccagcgagagcgagacgcagcctgtgaaccgattggcctacaacaccggtggtcaggtatcaaacaacaaccagaattcaaatggtggtggtggatctggaggtggcgggtctggcggcggaggatctggtgggggaggctccggaggcggaggtagcacccccttttatcctgtggggtacacggttaaacaaccaggcacatgtggcgatggagttcttcagcccggtgaggagtgcgacgatgggaacccagacgtatcagacggctgcatagactgtcacagagcttactgcggggatggataccgacaccagggggtagaagattgcgatggttcagactttggctacctcacttgtgagacgtaccttcccggctcatacggcgatttgcggtgtacgcaatactgtagcattgatagtacgccttgccgctattttaccggcgggggtggtgcaacacatcctacggtcggagtatacaatcaccaggaagtgttgcctggtagcgtgtggatggacagagacgtataccttcagggccccatctgggccaaaatcccggagacaggggcacactttcatccttctccggctatgggcggattcggactcaaacacccaccgcccatgatgctcatcaagaacacaccggtacctagcaacgtcgctgccttctctgacgtgcccgttaaaagcttcatcacccagtacagcaccggacaggtcacggtggagattgaatgggagctcaagaaagaaaactccaagaggtggaatcccgagatacagtacaccaacaactacaacaaccctacattcgtggactttgctccagacacctccggcgagtacaggactacgagggctattggaacccgttaccttacccgacccctgtaa

SEQ ID NO: 136 - DNA, 2592 bp, Artificial Sequence; identical to SEQ ID NO: 133
  LBV32

SEQ ID NO: 137 - DNA, 2529 bp, Artificial Sequence
  LBV33
atgtcgtttgttgatcaccctccggattggcttgaggagattggtgagggtctaaaggagtttttgggactcgaacctggcccacccaaaccgaagcccaaccagcagaagcaagacgacgcccgtggtcttgtactgcctggatataattacctgggacccggaaacggtctcgaccgcggagaacctgtcaaccgggctgacgaggtcgcgcgagagcacgacatctcgtacaacgagcagctccaggcgggagacaacccctacctcaagtacaaccacgcggacgccgagtttcaggagaagctcgcggacgacacctccttcgggggcaacctcggcaaggcagtctttcaggccaaaaaaagggttctcgaaccttttggcctggttgaggagcctgttaagacggctgctggtaagaaacggatagacgaccactatcccaaaaagaagaaggctcggatcgaagagaccgaagctggaaccagcggagcccagcagctgcagatcccagcccaaccagcctcaagtttgggagctgatacaatgtctgcgggaggtggcagcccactgggcgacaataaccaaggcgccgatggagtgggcaatgcctcgggagattggcattgcgattccacgtggatgggggaccgagtcatcaccaagtccacccgaacctgggtgctgcccagctacaacaaccatcagtaccttgagatccacagcggttccgtcgacggaagcaacgctaacgcttattttggatacagcaccccctgggggtactttgacttcaaccgcttccacagccactggagcccccgagactggcagcgactcgtcaacaactactggggattcagaccccggtccctcaaggtcaagatctttaacatccaagtcaaggaagtcacgacgcaggacggcaccaccaccatcgccaacaacctcacctccaccgtccaagtgtttacggacaacgactaccagctaccgtacgtcatcggcaacggaacggaggggtgcctgccggccttccctccgcaggtctttacgctgccgcagtacggctacgcgacactgaaccgtaacaacaccgacgatcccaccgagcggagcagtttcttctgcctggaatactttcccagcaagatgctgcggacgggcaacaactttgaattcacctacagcttcgaggaggtgcccttccactgcagcttcgctcccagccagaacctcttcaagctggccaatccgctggtggaccagtacctgtaccgctttgtgagcaccgacacttccggtaacctacagttccaaaagaacttgaaggccagatatgccaacacttacaagaattggtttccggggcccatgtgccggacccagggctggtacacaagcgcgggcacatataacaacaaaggcgttgccaactttgatacttcaaacaagatggaactggagggggctagttaccaagtaaaccctcaaccaaatggaatgacaaacacgcttcaggatagtaacaaatacgcgcttgaaaacaccatgatcttcaacgcacagaacgcccctccgggaacgacctctctgtaccaggagaacaatcttttgataaccagcgagagcgagacgcagcctgtgaaccgattggcctacaacaccggtggtcaggtatcaaacaacaaccagaattcaaatggtggtggtggatctggaggtggcgggtctggcggcggaggatctggtgggggaggctccggaggcggaggtagcacccccttttatcctgtggggtacacggttaaacaaccaggcacatgtggcgatggagttcttcagcccggtgaggagtgcgacgatgggaacccagacgtatcagacggctgcatagactgtcacagagcttactgcggggatggataccgacaccagggggtagaagattgcgatggttcagactttggctacctcacttgtgagacgtaccttcccggctcatacggcgatttgcggtgtacgcaatactgtagcattgatagtacgccttgccgctattttaccggcgggggtggtgcaacacatcctacggtcggagtatacaatcaccaggaagtgttgcctggtagcgtgtggatggacagagacgtataccttcagggccccatctgggccaaaatcccggagacaggggcacactttcatccttctccggctatgggcggattcggactcaaacacccaccgcccatgatgctcatcaagaacacaccggtacctagcaacgtcgctgccttctctgacgtgcccgttaaaagcttcatcacccagtacagcaccggacaggtcacggtggagattgaatgggagctcaagaaagaaaactccaagaggtggaatcccgagatacagtacaccaacaactacaacaaccctacattcgtggactttgctccagacacctccggcgagtacaggactacgagggctattggaacccgttaccttacccgacccctgtaa

SEQ ID NO: 138 - DNA, 2589 bp, Artificial Sequence
  LBV34
atggctgccgatggttatcttccggattggctcgaggacaacctctctgagggcattcgcgagtggtgggacttgaaacctggagccccgaaacccaaagccaaccagcaaaagcaggacaacggccggggtctggtgcttcctggctacaagtacctcggacccttcaacggactcgacaagggggagcccgtcaacgcggcggacgcagcggccctcgagcacgacaaggcctacgaccagcagctccaagcgggtgacaatccgtacctgcggtataaccacgccgacgccgagtttcaggagcgtctgcaagaagatacgtcttttgggggcaacctcgggcgagcagtcttccaggccaagaagcgggttctcgaacctctcggtctggttgagtctcctgtgaagacggctcctggaaagaagagaccggtagagccatcaccccagcgttctccagactcctctacgggcatcggcaagaaaggccagcagcccgcgaaaaagagactcaactttgggcagactggcgactcagagtcagtgcccgaccctcaaccaatcggagaaccccccgcaggcccctctggtctgggatctggtacaatgtctgcgggaggtggcagcccactgggcgacaataaccaaggcgccgatggagtgggcaatgcctcgggagattggcattgcgattccacgtggatgggggaccgagtcatcaccaagtccacccgaacctgggtgctgcccagctacaacaaccatcagtaccttgagatccacagcggttccgtcgacggaagcaacgctaacgcttattttggatacagcaccccctgggggtactttgacttcaaccgcttccacagccactggagcccccgagactggcagcgactcgtcaacaactactggggattcagaccccggtccctcaaggtcaagatctttaacatccaagtcaaggaagtcacgacgcaggacggcaccaccaccatcgccaacaacctcacctccaccgtccaagtgtttacggacaacgactaccagctaccgtacgtcatcggcaacggaacggaggggtgcctgccggccttccctccgcaggtctttacgctgccgcagtacggctacgcgacactgaaccgtaacaacaccgacgatcccaccgagcggagcagtttcttctgcctggaatactttcccagcaagatgctgcggacgggcaacaactttgaattcacctacagcttcgaggaggtgcccttccactgcagcttcgctcccagccagaacctcttcaagctggccaatccgctggtggaccagtacctgtaccgctttgtgagcaccgacacttccggtaacctacagttccaaaagaacttgaaggccagatatgccaacacttacaagaattggtttccggggcccatgtgccggacccagggctggtacacaagcgcgggcacatataacaacaaaggcgttgccaactttgatacttcaaacaagatggaactggagggggctagttaccaagtaaaccctcaaccaaatggaatgacaaacacgcttcaggatagtaacaaatacgcgcttgaaaacaccatgatcttcaacgcacagaacgcccctccgggaacgacctctctgtaccaggagaacaatcttttgataaccagcgagagcgagacgcagcctgtgaaccgattggcctacaacaccggtggtcaggtatcaaacaacaaccagaattcaaatggtggtggtggatctggaggtggcgggtctggcggcggaggatctggtgggggaggctccggaggcggaggtagcacccccttttatcctgtggggtacacggttaaacaaccaggcacatgtggcgatggagttcttcagcccggtgaggagtgcgacgatgggaacccagacgtatcagacggctgcatagactgtcacagagcttactgcggggatggataccgacaccagggggtagaagattgcgatggttcagactttggctacctcacttgtgagacgtaccttcccggctcatacggcgatttgcggtgtacgcaatactgtagcattgatagtacgccttgccgctattttaccggcgggggtggtgcaacacatcctacggtcggagtatacaatcaccaggaagtgttgcctggtagcgtgtggatggacagagacgtataccttcagggccccatctgggccaaaatcccggagacaggggcacactttcatccttctccggctatgggcggattcggactcaaacacccaccgcccatgatgctcatcaagaacacaccggtacctagcaacgtcgctgccttctctgacgtgcccgttaaaagcttcatcacccagtacagcaccggacaggtcacggtggagattgaatgggagctcaagaaagaaaactccaagaggtggaatcccgagatacagtacaccaacaactacaacaaccctacattcgtggactttgctccagacacctccggcgagtacaggactacgagggctattggaacccgttaccttacccgacccctgtaa

SEQ ID NO: 139 - DNA, 2550 bp, Artificial Sequence
  LBV35
atgactgacggttaccttccggattggctagaggacaacctctctgaaggcgttcgagagtggtgggcgctgcaacctggagcccctaaacccaaggcaaatcaacaacatcaggacaacgctcggggtcttgtgcttccgggttacaaatacctcggacccggcaacggactcgacaagggggaacccgtcaacgcagcggacgcggcagccctcgagcacgacaaggcctacgaccagcagctcaaggccggtgacaacccctacctcaagtacaaccacgccgacgcggagttccagcagcggcttcagggcgacacatcgtttgggggcaacctcggcagagcagtcttccaggccaaaaagagggttcttgaacctcttggtctggttgagcaagcgggtgagacggctcctggaaagaagagaccgttgattgaatccccccagcagcccgactcctccacgggtatcggcaaaaaaggcaagcagccggctaaaaagaagctcgttttcgaagacgaaactggagcaggcgacggaccccctgagggatcaacttccggagccatgtctgcgggaggtggcagcccactgggcgacaataaccaaggcgccgatggagtgggcaatgcctcgggagattggcattgcgattccacgtggatgggggaccgagtcatcaccaagtccacccgaacctgggtgctgcccagctacaacaaccatcagtaccttgagatccacagcggttccgtcgacggaagcaacgctaacgcttattttggatacagcaccccctgggggtactttgacttcaaccgcttccacagccactggagcccccgagactggcagcgactcgtcaacaactactggggattcagaccccggtccctcaaggtcaagatctttaacatccaagtcaaggaagtcacgacgcaggacggcaccaccaccatcgccaacaacctcacctccaccgtccaagtgtttacggacaacgactaccagctaccgtacgtcatcggcaacggaacggaggggtgcctgccggccttccctccgcaggtctttacgctgccgcagtacggctacgcgacactgaaccgtaacaacaccgacgatcccaccgagcggagcagtttcttctgcctggaatactttcccagcaagatgctgcggacgggcaacaactttgaattcacctacagcttcgaggaggtgcccttccactgcagcttcgctcccagccagaacctcttcaagctggccaatccgctggtggaccagtacctgtaccgctttgtgagcaccgacacttccggtaacctacagttccaaaagaacttgaaggccagatatgccaacacttacaagaattggtttccggggcccatgtgccggacccagggctggtacacaagcgcgggcacatataacaacaaaggcgttgccaactttgatacttcaaacaagatggaactggagggggctagttaccaagtaaaccctcaaccaaatggaatgacaaacacgcttcaggatagtaacaaatacgcgcttgaaaacaccatgatcttcaacgcacagaacgcccctccgggaacgacctctctgtaccaggagaacaatcttttgataaccagcgagagcgagacgcagcctgtgaaccgattggcctacaacaccggtggtcaggtatcaaacaacaaccagaattcaaatggtggtggtggatctggaggtggcgggtctggcggcggaggatctggtgggggaggctccggaggcggaggtagcacccccttttatcctgtggggtacacggttaaacaaccaggcacatgtggcgatggagttcttcagcccggtgaggagtgcgacgatgggaacccagacgtatcagacggctgcatagactgtcacagagcttactgcggggatggataccgacaccagggggtagaagattgcgatggttcagactttggctacctcacttgtgagacgtaccttcccggctcatacggcgatttgcggtgtacgcaatactgtagcattgatagtacgccttgccgctattttaccggcgggggtggtgcaacacatcctacggtcggagtatacaatcaccaggaagtgttgcctggtagcgtgtggatggacagagacgtataccttcagggccccatctgggccaaaatcccggagacaggggcacactttcatccttctccggctatgggcggattcggactcaaacacccaccgcccatgatgctcatcaagaacacaccggtacctagcaacgtcgctgccttctctgacgtgcccgttaaaagcttcatcacccagtacagcaccggacaggtcacggtggagattgaatgggagctcaagaaagaaaactccaagaggtggaatcccgagatacagtacaccaacaactacaacaaccctacattcgtggactttgctccagacacctccggcgagtacaggactacgagggctattggaacccgttaccttacccgacccctgtaa

SEQ ID NO: 140 - DNA, 2592 bp, Artificial Sequence; identical to SEQ ID NO: 133
  LBV41

SEQ ID NO: 141 - DNA, 2250 bp, Artificial Sequence
  LBV42
atggctgccgatggttatcttccggattggctcgaggacaacctctctgagggcattcgcgagtggtgggacttgaaacctggagccccgaaacccaaagccaaccagcaaaagcaggacaacggccggggtctggtgcttcctggctacaagtacctcggacccttcaacggactcgacaagggggagcccgtcaacgcggcggacgcagcggccctcgagcacgacaaggcctacgaccagcagctccaagcgggtgacaatccgtacctgcggtataaccacgccgacgccgagtttcaggagcgtctgcaagaagatacgtcttttgggggcaacctcgggcgagcagtcttccaggccaagaagcgggttctcgaacctctcggtctggttgagtctcctgtgaagacggctcctggaaagaagagaccggtagagccatcaccccagcgttctccagactcctctacgggcatcggcaagaaaggccagcagcccgcgaaaaagagactcaactttgggcagactggcgactcagagtcagtgcccgaccctcaaccaatcggagaaccccccgcaggcccctctggtctgggatctggtacaatggctgcaggcggtggcgctccaatggcagacaataacgaaggcgccgacggagtgggtagttcctcaggaaattggcattgcgattccacatggctgggcgacagagtcatcaccaccagcacccgaacctgggccctccccacctacaacaaccacctctacaagcaaatctccaacgggacttcgggaggaagcaccaacgacaacacctacttcggctacagcaccccctgggggtattttgactttaacagattccactgccacttctcaccacgtgactggcagcgactcatcaacaacaactggggattccggcccaagagactcaacttcaagctcttcaacatccaggtcaaggaggtcacgcagaatgaaggcaccaagaccatcgccaataaccttaccagcacgattcaggtctttacggactcggaataccagctcccgtacgtcctcggctctgcgcaccagggctgcctgcctccgttcccggcggacgtcttcatgattcctcagtacgggtacctgactctgaacaatggcagtcaggccgtgggccgttcctccttctactgcctggagtactttccttctcaaatgctgagaacgggcaacaactttgagttcagctacaactttgaggacgtgccttttcacagcagctacgcgcacagccaaagcctggaccggctgatgaaccccctcatcgaccagtacctgtactacctgtctcggactcagtccacgggaggtaccgcaggaactcagcagttgctattttctcaggccgggcctaataacatgtcggctcaggccaaaaactggctacccgggccctgctaccggcagcaacgcgtctccacgacactgtcgcaaaataacaacagcaactttgcctggaccggtgccaccaagtatcatctgaatggcagagactctctggtaaatcccggtgtcgctatggcaacccacaaggacgacgaagagcgattttttccgtccagcggagtcttaatgtttgggaaacagggagctggaaaagacaacgtggactatagcagcgttatgctaaccagtgaggaagaaattaaaaccaccaacccagtggccacagaacagtacggcgtggtggccgataacctgcaacagcaaggaagtggtcgaggtgacctcggtctttctggtggagccgctcctattgtaggggccgtcaacagtcaaggagccttacctggcatggtctggcagaaccgggacgtgtacctgcagggtcctatctgggccaagattcctcacacggacggaaactttcatccctcgccgctgatgggaggctttggactgaaacacccgcctcctcagatcctgattaagaatacacctgttcccgcggatcctccaactaccttcaaccaagctaagctggcgtcgttcatcacgcagtacagcaccggacaggtcagcgtggaaattgaatgggagctgcagaaagaaaacagcaaacgctggaacccagagattcaatacacttccaactactacaaatctacaaatgtggactttgctgttaacacagagggcacttattctgagcctcgccccatcggcacccgttacctcacccgtaatctgtaa

SEQ ID NO: 142 - DNA, 2250 bp, Artificial Sequence; identical to SEQ ID NO: 141
  LBV43

SEQ ID NO: 143 - DNA, 2553 bp, Artificial Sequence
  LBV44
atgactgacggttaccttccggattggctagaggacaacctctctgaaggcgttcgagagtggtgggcgctgcaacctggagcccctaaacccaaggcaaatcaacaacatcaggacaacgctcggggtcttgtgcttccgggttacaaatacctcggacccggcaacggactcgacaagggggaacccgtcaacgcagcggacgcggcagccctcgagcacgacaaggcctacgaccagcagctcaaggccggtgacaacccctacctcaagtacaaccacgccgacgcggagttccagcagcggcttcagggcgacacatcgtttgggggcaacctcggcagagcagtcttccaggccaaaaagagggttcttgaacctcttggtctggttgagcaagcgggtgagacggctcctggaaagaagagaccgttgattgaatccccccagcagcccgactcctccacgggtatcggcaaaaaaggcaagcagccggctaaaaagaagctcgttttcgaagacgaaactggagcaggcgacggaccccctgagggatcaacttccggagccatggctgcaggcggtggcgctccaatggcagacaataacgaaggcgccgacggagtgggtagttcctcaggaaattggcattgcgattccacatggctgggcgacagagtcatcaccaccagcacccgaacctgggccctccccacctacaacaaccacctctacaagcaaatctccaacgggacttcgggaggaagcaccaacgacaacacctacttcggctacagcaccccctgggggtattttgactttaacagattccactgccacttctcaccacgtgactggcagcgactcatcaacaacaactggggattccggcccaagagactcaacttcaagctcttcaacatccaggtcaaggaggtcacgcagaatgaaggcaccaagaccatcgccaataaccttaccagcacgattcaggtctttacggactcggaataccagctcccgtacgtcctcggctctgcgcaccagggctgcctgcctccgttcccggcggacgtcttcatgattcctcagtacgggtacctgactctgaacaatggcagtcaggccgtgggccgttcctccttctactgcctggagtactttccttctcaaatgctgagaacgggcaacaactttgagttcagctacaactttgaggacgtgccttttcacagcagctacgcgcacagccaaagcctggaccggctgatgaaccccctcatcgaccagtacctgtactacctgtctcggactcagtccacgggaggtaccgcaggaactcagcagttgctattttctcaggccgggcctaataacatgtcggctcaggccaaaaactggctacccgggccctgctaccggcagcaacgcgtctccacgacactgtcgcaaaataacaacagcaactttgcctggaccggtgccaccaagtatcatctgaatggcagagactctctggtaaatcccggtgtcgctatggcaacccacaaggacgacgaagagcgattttttccgtccagcggagtcttaatgtttgggaaacagggagctggaaaagacaacgtggactatagcagcgttatgctaaccagtgaggaagaaattaaaaccaccaacccagtggccacagaacagtacggcgtggtggccgataacctgcaacagcaaggtggtggtggatctggaggtggcgggtctggcggcggaggatctggtgggggaggctccggaggcggaggtagcacccccttttatcctgtggggtacacggttaaacaaccaggcacatgtggcgatggagttcttcagcccggtgaggagtgcgacgatgggaacccagacgtatcagacggctgcatagactgtcacagagcttactgcggggatggataccgacaccagggggtagaagattgcgatggttcagactttggctacctcacttgtgagacgtaccttcccggctcatacggcgatttgcggtgtacgcaatactgtagcattgatagtacgccttgccgctattttaccggcgggggtggtgcagccgctcctattgtaggggccgtcaacagtcaaggagccttacctggcatggtctggcagaaccgggacgtgtacctgcagggtcctatctgggccaagattcctcacacggacggaaactttcatccctcgccgctgatgggaggctttggactgaaacacccgcctcctcagatcctgattaagaatacacctgttcccgcggatcctccaactaccttcaaccaagctaagctggcgtcgttcatcacgcagtacagcaccggacaggtcagcgtggaaattgaatgggagctgcagaaagaaaacagcaaacgctggaacccagagattcaatacacttccaactactacaaatctacaaatgtggactttgctgttaacacagagggcacttattctgagcctcgccccatcggcacccgttacctcacccgtaatctgtaa

SEQ ID NO: 144 - DNA, 2211 bp, Artificial Sequence
  LBV45
atgactgacggttaccttccggattggctagaggacaacctctctgaaggcgttcgagagtggtgggcgctgcaacctggagcccctaaacccaaggcaaatcaacaacatcaggacaacgctcggggtcttgtgcttccgggttacaaatacctcggacccggcaacggactcgacaagggggaacccgtcaacgcagcggacgcggcagccctcgagcacgacaaggcctacgaccagcagctcaaggccggtgacaacccctacctcaagtacaaccacgccgacgcggagttccagcagcggcttcagggcgacacatcgtttgggggcaacctcggcagagcagtcttccaggccaaaaagagggttcttgaacctcttggtctggttgagcaagcgggtgagacggctcctggaaagaagagaccgttgattgaatccccccagcagcccgactcctccacgggtatcggcaaaaaaggcaagcagccggctaaaaagaagctcgttttcgaagacgaaactggagcaggcgacggaccccctgagggatcaacttccggagccatggctgcaggcggtggcgctccaatggcagacaataacgaaggcgccgacggagtgggtagttcctcaggaaattggcattgcgattccacatggctgggcgacagagtcatcaccaccagcacccgaacctgggccctccccacctacaacaaccacctctacaagcaaatctccaacgggacttcgggaggaagcaccaacgacaacacctacttcggctacagcaccccctgggggtattttgactttaacagattccactgccacttctcaccacgtgactggcagcgactcatcaacaacaactggggattccggcccaagagactcaacttcaagctcttcaacatccaggtcaaggaggtcacgcagaatgaaggcaccaagaccatcgccaataaccttaccagcacgattcaggtctttacggactcggaataccagctcccgtacgtcctcggctctgcgcaccagggctgcctgcctccgttcccggcggacgtcttcatgattcctcagtacgggtacctgactctgaacaatggcagtcaggccgtgggccgttcctccttctactgcctggagtactttccttctcaaatgctgagaacgggcaacaactttgagttcagctacaactttgaggacgtgccttttcacagcagctacgcgcacagccaaagcctggaccggctgatgaaccccctcatcgaccagtacctgtactacctgtctcggactcagtccacgggaggtaccgcaggaactcagcagttgctattttctcaggccgggcctaataacatgtcggctcaggccaaaaactggctacccgggccctgctaccggcagcaacgcgtctccacgacactgtcgcaaaataacaacagcaactttgcctggaccggtgccaccaagtatcatctgaatggcagagactctctggtaaatcccggtgtcgctatggcaacccacaaggacgacgaagagcgattttttccgtccagcggagtcttaatgtttgggaaacagggagctggaaaagacaacgtggactatagcagcgttatgctaaccagtgaggaagaaattaaaaccaccaacccagtggccacagaacagtacggcgtggtggccgataacctgcaacagcaaggaagtggtcgaggtgacctcggtctttctggtggagccgctcctattgtaggggccgtcaacagtcaaggagccttacctggcatggtctggcagaaccgggacgtgtacctgcagggtcctatctgggccaagattcctcacacggacggaaactttcatccctcgccgctgatgggaggctttggactgaaacacccgcctcctcagatcctgattaagaatacacctgttcccgcggatcctccaactaccttcaaccaagctaagctggcgtcgttcatcacgcagtacagcaccggacaggtcagcgtggaaattgaatgggagctgcagaaagaaaacagcaaacgctggaacccagagattcaatacacttccaactactacaaatctacaaatgtggactttgctgttaacacagagggcacttattctgagcctcgccccatcggcacccgttacctcacccgtaatctgtaa

SEQ ID NO: 145 - DNA, 2589 bp, Artificial Sequence
  LBV46
atggctgccgatggttatcttccggattggctcgaggacaaccttagtgaaggaattcgcgagtggtgggctttgaaacctggagcccctcaacccaaggcaaatcaacaacatcaagacaacgctcgaggtcttgtgcttccgggttacaaataccttggacccggcaacggactcgacaagggggagccggtcaacgcagcagacgcggcggccctcgagcacgacaaggcctacgaccagcagctcaaggccggagacaacccgtacctcaagtacaaccacgccgacgccgagttccaggagcggctcaaagaagatacgtcttttgggggcaacctcgggcgagcagtcttccaggccaaaaagaggcttcttgaacctcttggtctggttgaggaagcggctaagacggctcctggaaagaagaggcctgtagagcagtctcctcaggaaccggactcctccgcgggtattggcaaatcgggtgcacagcccgctaaaaagagactcaatttcggtcagactggcgacacagagtcagtcccagaccctcaaccaatcggagaacctcccgcagccccctcaggtgtgggatctcttacaatggcttcaggtggtggcgcaccagtggcagacaataacgaaggtgccgatggagtgggtagttcctcgggaaattggcattgcgattcccaatggctgggggacagagtcatcaccaccagcacccgaacctgggccctgcccacctacaacaatcacctctacaagcaaatctccaacagcacatctggaggatcttcaaatgacaacgcctacttcggctacagcaccccctgggggtattttgacttcaacagattccactgccacttctcaccacgtgactggcagcgactcatcaacaacaactggggattccggcctaagcgactcaacttcaagctcttcaacattcaggtcaaagaggttacggacaacaatggagtcaagaccatcgccaataaccttaccagcacggtccaggtcttcacggactcagactatcagctcccgtacgtgctcgggtcggctcacgagggctgcctcccgccgttcccagcggacgttttcatgattcctcagtacgggtatctgacgcttaatgatggaagccaggccgtgggtcgttcgtccttttactgcctggaatatttcccgtcgcaaatgctaagaacgggtaacaacttccagttcagctacgagtttgagaacgtacctttccatagcagctacgctcacagccaaagcctggaccgactaatgaatccactcatcgaccaatacttgtactatctctcaaagactattaacggttctggacagaatcaacaaacgctaaaattcagtgtggccggacccagcaacatggctgtccagggaagaaactacatacctggacccagctaccgacaacaacgtgtctcaaccactgtgactcaaaacaacaacagcgaatttgcttggcctggagcttcttcttgggctctcaatggacgtaatagcttgatgaatcctggacctgctatggccagccacaaagaaggagaggaccgtttctttcctttgtctggatctttaatttttggcaaacaaggaactggaagagacaacgtggatgcggacaaagtcatgataaccaacgaagaagaaattaaaactactaacccggtagcaacggagtcctatggacaagtggccacaaaccaccagagtgcccaaggtggtggtggatctggaggtggcgggtctggcggcggaggatctggtgggggaggctccggaggcggaggtagcacccccttttatcctgtggggtacacggttaaacaaccaggcacatgtggcgatggagttcttcagcccggtgaggagtgcgacgatgggaacccagacgtatcagacggctgcatagactgtcacagagcttactgcggggatggataccgacaccagggggtagaagattgcgatggttcagactttggctacctcacttgtgagacgtaccttcccggctcatacggcgatttgcggtgtacgcaatactgtagcattgatagtacgccttgccgctattttaccggcgggggtggtgcagcacaggcgcagaccggctgggttcaaaaccaaggaatacttccgggtatggtttggcaggacagagatgtgtacctgcaaggacccatttgggccaaaattcctcacacggacggcaactttcacccttctccgctgatgggagggtttggaatgaagcacccgcctcctcagatcctcatcaaaaacacacctgtacctgcggatcctccaacggccttcaacaaggacaagctgaactctttcatcacccagtattctactggccaagtcagcgtggagatcgagtgggagctgcagaaggaaaacagcaagcgctggaacccggagatccagtacacttccaactattacaagtctaataatgttgaatttgctgttaatactgaaggtgtatatagtgaaccccgccccattggcaccagatacctgactcgtaatctgtaa

SEQ ID NO: 146 - DNA, 2247 bp, Artificial Sequence
  LBV47
atggctgccgatggttatcttccggattggctcgaggacaaccttagtgaaggaattcgcgagtggtgggctttgaaacctggagcccctcaacccaaggcaaatcaacaacatcaagacaacgctcgaggtcttgtgcttccgggttacaaataccttggacccggcaacggactcgacaagggggagccggtcaacgcagcagacgcggcggccctcgagcacgacaaggcctacgaccagcagctcaaggccggagacaacccgtacctcaagtacaaccacgccgacgccgagttccaggagcggctcaaagaagatacgtcttttgggggcaacctcgggcgagcagtcttccaggccaaaaagaggcttcttgaacctcttggtctggttgaggaagcggctaagacggctcctggaaagaagaggcctgtagagcagtctcctcaggaaccggactcctccgcgggtattggcaaatcgggtgcacagcccgctaaaaagagactcaatttcggtcagactggcgacacagagtcagtcccagaccctcaaccaatcggagaacctcccgcagccccctcaggtgtgggatctcttacaatggcttcaggtggtggcgcaccagtggcagacaataacgaaggtgccgatggagtgggtagttcctcgggaaattggcattgcgattcccaatggctgggggacagagtcatcaccaccagcacccgaacctgggccctgcccacctacaacaatcacctctacaagcaaatctccaacagcacatctggaggatcttcaaatgacaacgcctacttcggctacagcaccccctgggggtattttgacttcaacagattccactgccacttctcaccacgtgactggcagcgactcatcaacaacaactggggattccggcctaagcgactcaacttcaagctcttcaacattcaggtcaaagaggttacggacaacaatggagtcaagaccatcgccaataaccttaccagcacggtccaggtcttcacggactcagactatcagctcccgtacgtgctcgggtcggctcacgagggctgcctcccgccgttcccagcggacgttttcatgattcctcagtacgggtatctgacgcttaatgatggaagccaggccgtgggtcgttcgtccttttactgcctggaatatttcccgtcgcaaatgctaagaacgggtaacaacttccagttcagctacgagtttgagaacgtacctttccatagcagctacgctcacagccaaagcctggaccgactaatgaatccactcatcgaccaatacttgtactatctctcaaagactattaacggttctggacagaatcaacaaacgctaaaattcagtgtggccggacccagcaacatggctgtccagggaagaaactacatacctggacccagctaccgacaacaacgtgtctcaaccactgtgactcaaaacaacaacagcgaatttgcttggcctggagcttcttcttgggctctcaatggacgtaatagcttgatgaatcctggacctgctatggccagccacaaagaaggagaggaccgtttctttcctttgtctggatctttaatttttggcaaacaaggaactggaagagacaacgtggatgcggacaaagtcatgataaccaacgaagaagaaattaaaactactaacccggtagcaacggagtcctatggacaagtggccacaaaccaccagagtgcccaaggaagtggtcgaggtgacctcggtctttctggtggagcacaggcgcagaccggctgggttcaaaaccaaggaatacttccgggtatggtttggcaggacagagatgtgtacctgcaaggacccatttgggccaaaattcctcacacggacggcaactttcacccttctccgctgatgggagggtttggaatgaagcacccgcctcctcagatcctcatcaaaaacacacctgtacctgcggatcctccaacggccttcaacaaggacaagctgaactctttcatcacccagtattctactggccaagtcagcgtggagatcgagtgggagctgcagaaggaaaacagcaagcgctggaacccggagatccagtacacttccaactattacaagtctaataatgttgaatttgctgttaatactgaaggtgtatatagtgaaccccgccccattggcaccagatacctgactcgtaatctgtaa

SEQ ID NO: 147 - DNA, 2247 bp, Artificial Sequence; identical to SEQ ID NO: 146
  LBV48

SEQ ID NO: 148 - DNA, 2529 bp, Artificial Sequence; identical to SEQ ID NO: 135
  LBV49

SEQ ID NO: 149 - DNA, 2529 bp, Artificial Sequence; identical to SEQ ID NO: 137
  LBV50

SEQ ID NO: 150 - DNA, 2370 bp, Artificial Sequence
  LBV54
atggctgccgatggttatcttccggattggctcgaggacaaccttagtgaaggaattcgcgagtggtgggctttgaaacctggagcccctcaacccaaggcaaatcaacaacatcaagacaacgctcgaggtcttgtgcttccgggttacaaataccttggacccggcaacggactcgacaagggggagccggtcaacgcagcagacgcggcggccctcgagcacgacaaggcctacgaccagcagctcaaggccggagacaacccgtacctcaagtacaaccacgccgacgccgagttccaggagcggctcaaagaagatacgtcttttgggggcaacctcgggcgagcagtcttccaggccaaaaagaggcttcttgaacctcttggtctggttgaggaagcggctaagacggctcctggaaagaagaggcctgtagagcagtctcctcaggaaccggactcctccgcgggtattggcaaatcgggtgcacagcccgctaaaaagagactcaatttcggtcagactggcgacacagagtcagtcccagaccctcaaccaatcggagaacctcccgcagccccctcaggtgtgggatctcttacaatggcttcaggtggtggcgcaccagtggcagacaataacgaaggtgccgatggagtgggtagttcctcgggaaattggcattgcgattcccaatggctgggggacagagtcatcaccaccagcacccgaacctgggccctgcccacctacaacaatcacctctacaagcaaatctccaacagcacatctggaggatcttcaaatgacaacgcctacttcggctacagcaccccctgggggtattttgacttcaacagattccactgccacttctcaccacgtgactggcagcgactcatcaacaacaactggggattccggcctaagcgactcaacttcaagctcttcaacattcaggtcaaagaggttacggacaacaatggagtcaagaccatcgccaataaccttaccagcacggtccaggtcttcacggactcagactatcagctcccgtacgtgctcgggtcggctcacgagggctgcctcccgccgttcccagcggacgttttcatgattcctcagtacgggtatctgacgcttaatgatggaagccaggccgtgggtcgttcgtccttttactgcctggaatatttcccgtcgcaaatgctaagaacgggtaacaacttccagttcagctacgagtttgagaacgtacctttccatagcagctacgctcacagccaaagcctggaccgactaatgaatccactcatcgaccaatacttgtactatctctcaaagactattaacggttctggacagaatcaacaaacgctaaaattcagtgtggccggacccagcaacatggctgtccagggaagaaactacatacctggacccagctaccgacaacaacgtgtctcaaccactgtgactcaaaacaacaacagcgaatttgcttggcctggagcttcttcttgggctctcaatggacgtaatagcttgatgaatcctggacctgctatggccagccacaaagaaggagaggaccgtttctttcctttgtctggatctttaatttttggcaaacaaggaactggaagagacaacgtggatgcggacaaagtcatgataaccaacgaagaagaaattaaaactactaacccggtagcaacggagtcctatggacaagtggccacaaaccaccagagtgcccaaggtggtggtggatctggaggtggcgggtcttcaaatagtcgaggtgactataactctcttggcggcggaggatctgaaaatcgacgaggtgactttaacaatacaggtgggggaggctccggtcgaggtgacctcagcacacctggaggcggaggtagcgcacaggcgcagaccggctgggttcaaaaccaaggaatacttccgggtatggtttggcaggacagagatgtgtacctgcaaggacccatttgggccaaaattcctcacacggacggcaactttcacccttctccgctgatgggagggtttggaatgaagcacccgcctcctcagatcctcatcaaaaacacacctgtacctgcggatcctccaacggccttcaacaaggacaagctgaactctttcatcacccagtattctactggccaagtcagcgtggagatcgagtgggagctgcagaaggaaaacagcaagcgctggaacccggagatccagtacacttccaactattacaagtctaataatgttgaatttgctgttaatactgaaggtgtatatagtgaaccccgccccattggcaccagatacctgactcgtaatctgtaa

SEQ ID NO: 151 - DNA, 2670 bp, Artificial Sequence
  LBV55
atggctgccgatggttatcttccggattggctcgaggacaaccttagtgaaggaattcgcgagtggtgggctttgaaacctggagcccctcaacccaaggcaaatcaacaacatcaagacaacgctcgaggtcttgtgcttccgggttacaaataccttggacccggcaacggactcgacaagggggagccggtcaacgcagcagacgcggcggccctcgagcacgacaaggcctacgaccagcagctcaaggccggagacaacccgtacctcaagtacaaccacgccgacgccgagttccaggagcggctcaaagaagatacgtcttttgggggcaacctcgggcgagcagtcttccaggccaaaaagaggcttcttgaacctcttggtctggttgaggaagcggctaagacggctcctggaaagaagaggcctgtagagcagtctcctcaggaaccggactcctccgcgggtattggcaaatcgggtgcacagcccgctaaaaagagactcaatttcggtcagactggcgacacagagtcagtcccagaccctcaaccaatcggagaacctcccgcagccccctcaggtgtgggatctcttacaatggcttcaggtggtggcgcaccagtggcagacaataacgaaggtgccgatggagtgggtagttcctcgggaaattggcattgcgattcccaatggctgggggacagagtcatcaccaccagcacccgaacctgggccctgcccacctacaacaatcacctctacaagcaaatctccaacagcacatctggaggatcttcaaatgacaacgcctacttcggctacagcaccccctgggggtattttgacttcaacagattccactgccacttctcaccacgtgactggcagcgactcatcaacaacaactggggattccggcctaagcgactcaacttcaagctcttcaacattcaggtcaaagaggttacggacaacaatggagtcaagaccatcgccaataaccttaccagcacggtccaggtcttcacggactcagactatcagctcccgtacgtgctcgggtcggctcacgagggctgcctcccgccgttcccagcggacgttttcatgattcctcagtacgggtatctgacgcttaatgatggaagccaggccgtgggtcgttcgtccttttactgcctggaatatttcccgtcgcaaatgctaagaacgggtaacaacttccagttcagctacgagtttgagaacgtacctttccatagcagctacgctcacagccaaagcctggaccgactaatgaatccactcatcgaccaatacttgtactatctctcaaagactattaacggttctggacagaatcaacaaacgctaaaattcagtgtggccggacccagcaacatggctgtccagggaagaaactacatacctggacccagctaccgacaacaacgtgtctcaaccactgtgactcaaaacaacaacagcgaatttgcttggcctggagcttcttcttgggctctcaatggacgtaatagcttgatgaatcctggacctgctatggccagccacaaagaaggagaggaccgtttctttcctttgtctggatctttaatttttggcaaacaaggaactggaagagacaacgtggatgcggacaaagtcatgataaccaacgaagaagaaattaaaactactaacccggtagcaacggagtcctatggacaagtggccacaaaccaccagagtgcccaaggtggtggaggttcaggaggcggtggttctggcggaggaggtagtggtggcggtggatcaggcggaggtggaagtgaggtccaactccaggcaagcggaggaggattcgttcaagctggcggttctcttcgattgtcctgtgctgtatccggacgaggtgatctcagcacgcctagctatggtatgcattgggtccgacaagcaccgggtaaagagcgcgagtttgtagcggggataagccggggtgactacaattcactctattatgctgattccgtacaaggccgctttacaatttcacgagacaatgcgaagaacaccgtttatttgcagatgaatagtctgaagcccgaagatactgcaacgtattactgcgctgaaaatagaagaggcgatttcaataacacctactgggggcaagggactcaagtcacagtttcaagcggaggcggaggtagcgcacaggcgcagaccggctgggttcaaaaccaaggaatacttccgggtatggtttggcaggacagagatgtgtacctgcaaggacccatttgggccaaaattcctcacacggacggcaactttcacccttctccgctgatgggagggtttggaatgaagcacccgcctcctcagatcctcatcaaaaacacacctgtacctgcggatcctccaacggccttcaacaaggacaagctgaactctttcatcacccagtattctactggccaagtcagcgtggagatcgagtgggagctgcagaaggaaaacagcaagcgctggaacccggagatccagtacacttccaactattacaagtctaataatgttgaatttgctgttaatactgaaggtgtatatagtgaaccccgccccattggcaccagatacctgactcgtaatctgtaa

SEQ ID NO: 152 - DNA, 2397 bp, Artificial Sequence
  LBV56
atggctgccgatggttatcttccggattggctcgaggacaaccttagtgaaggaattcgcgagtggtgggctttgaaacctggagcccctcaacccaaggcaaatcaacaacatcaagacaacgctcgaggtcttgtgcttccgggttacaaataccttggacccggcaacggactcgacaagggggagccggtcaacgcagcagacgcggcggccctcgagcacgacaaggcctacgaccagcagctcaaggccggagacaacccgtacctcaagtacaaccacgccgacgccgagttccaggagcggctcaaagaagatacgtcttttgggggcaacctcgggcgagcagtcttccaggccaaaaagaggcttcttgaacctcttggtctggttgaggaagcggctaagacggctcctggaaagaagaggcctgtagagcagtctcctcaggaaccggactcctccgcgggtattggcaaatcgggtgcacagcccgctaaaaagagactcaatttcggtcagactggcgacacagagtcagtcccagaccctcaaccaatcggagaacctcccgcagccccctcaggtgtgggatctcttacaatggcttcaggtggtggcgcaccagtggcagacaataacgaaggtgccgatggagtgggtagttcctcgggaaattggcattgcgattcccaatggctgggggacagagtcatcaccaccagcacccgaacctgggccctgcccacctacaacaatcacctctacaagcaaatctccaacagcacatctggaggatcttcaaatgacaacgcctacttcggctacagcaccccctgggggtattttgacttcaacagattccactgccacttctcaccacgtgactggcagcgactcatcaacaacaactggggattccggcctaagcgactcaacttcaagctcttcaacattcaggtcaaagaggttacggacaacaatggagtcaagaccatcgccaataaccttaccagcacggtccaggtcttcacggactcagactatcagctcccgtacgtgctcgggtcggctcacgagggctgcctcccgccgttcccagcggacgttttcatgattcctcagtacgggtatctgacgcttaatgatggaagccaggccgtgggtcgttcgtccttttactgcctggaatatttcccgtcgcaaatgctaagaacgggtaacaacttccagttcagctacgagtttgagaacgtacctttccatagcagctacgctcacagccaaagcctggaccgactaatgaatccactcatcgaccaatacttgtactatctctcaaagactattaacggttctggacagaatcaacaaacgctaaaattcagtgtggccggacccagcaacatggctgtccagggaagaaactacatacctggacccagctaccgacaacaacgtgtctcaaccactgtgactcaaaacaacaacagcgaatttgcttggcctggagcttcttcttgggctctcaatggacgtaatagcttgatgaatcctggacctgctatggccagccacaaagaaggagaggaccgtttctttcctttgtctggatctttaatttttggcaaacaaggaactggaagagacaacgtggatgcggacaaagtcatgataaccaacgaagaagaaattaaaactactaacccggtagcaacggagtcctatggacaagtggccacaaaccaccagagtgcccaaggtggtggtggatctggaggtggcgggtctaagttctgggccaccgtgggcagaggcgacctgagcacccccttcgaggtgcccgtgtacgccgagaccctggacgaggccctggagctggccgagaacagaagaggcgacttcaacaacaccgtgaccagagtgagacccggaggcggaggtagcgcacaggcgcagaccggctgggttcaaaaccaaggaatacttccgggtatggtttggcaggacagagatgtgtacctgcaaggacccatttgggccaaaattcctcacacggacggcaactttcacccttctccgctgatgggagggtttggaatgaagcacccgcctcctcagatcctcatcaaaaacacacctgtacctgcggatcctccaacggccttcaacaaggacaagctgaactctttcatcacccagtattctactggccaagtcagcgtggagatcgagtgggagctgcagaaggaaaacagcaagcgctggaacccggagatccagtacacttccaactattacaagtctaataatgttgaatttgctgttaatactgaaggtgtatatagtgaaccccgccccattggcaccagatacctgactcgtaatctgtaa

SEQ ID NO: 153 - DNA, 2289 bp, Artificial Sequence
  LBV57
atggctgccgatggttatcttccggattggctcgaggacaaccttagtgaaggaattcgcgagtggtgggctttgaaacctggagcccctcaacccaaggcaaatcaacaacatcaagacaacgctcgaggtcttgtgcttccgggttacaaataccttggacccggcaacggactcgacaagggggagccggtcaacgcagcagacgcggcggccctcgagcacgacaaggcctacgaccagcagctcaaggccggagacaacccgtacctcaagtacaaccacgccgacgccgagttccaggagcggctcaaagaagatacgtcttttgggggcaacctcgggcgagcagtcttccaggccaaaaagaggcttcttgaacctcttggtctggttgaggaagcggctaagacggctcctggaaagaagaggcctgtagagcagtctcctcaggaaccggactcctccgcgggtattggcaaatcgggtgcacagcccgctaaaaagagactcaatttcggtcagactggcgacacagagtcagtcccagaccctcaaccaatcggagaacctcccgcagccccctcaggtgtgggatctcttacaatggcttcaggtggtggcgcaccagtggcagacaataacgaaggtgccgatggagtgggtagttcctcgggaaattggcattgcgattcccaatggctgggggacagagtcatcaccaccagcacccgaacctgggccctgcccacctacaacaatcacctctacaagcaaatctccaacagcacatctggaggatcttcaaatgacaacgcctacttcggctacagcaccccctgggggtattttgacttcaacagattccactgccacttctcaccacgtgactggcagcgactcatcaacaacaactggggattccggcctaagcgactcaacttcaagctcttcaacattcaggtcaaagaggttacggacaacaatggagtcaagaccatcgccaataaccttaccagcacggtccaggtcttcacggactcagactatcagctcccgtacgtgctcgggtcggctcacgagggctgcctcccgccgttcccagcggacgttttcatgattcctcagtacgggtatctgacgcttaatgatggaagccaggccgtgggtcgttcgtccttttactgcctggaatatttcccgtcgcaaatgctaagaacgggtaacaacttccagttcagctacgagtttgagaacgtacctttccatagcagctacgctcacagccaaagcctggaccgactaatgaatccactcatcgaccaatacttgtactatctctcaaagactattaacggttctggacagaatcaacaaacgctaaaattcagtgtggccggacccagcaacatggctgtccagggaagaaactacatacctggacccagctaccgacaacaacgtgtctcaaccactgtgactcaaaacaacaacagcgaatttgcttggcctggagcttcttcttgggctctcaatggacgtaatagcttgatgaatcctggacctgctatggccagccacaaagaaggagaggaccgtttctttcctttgtctggatctttaatttttggcaaacaaggaactggaagagacaacgtggatgcggacaaagtcatgataaccaacgaagaagaaattaaaactactaacccggtagcaacggagtcctatggacaagtggccacaaaccaccagagtgcccaaggtggtggtggagcatgccgaggtgactataactctctttgccgaggtgacctcagcacatgcggaggcggaggtagcgcacaggcgcagaccggctgggttcaaaaccaaggaatacttccgggtatggtttggcaggacagagatgtgtacctgcaaggacccatttgggccaaaattcctcacacggacggcaactttcacccttctccgctgatgggagggtttggaatgaagcacccgcctcctcagatcctcatcaaaaacacacctgtacctgcggatcctccaacggccttcaacaaggacaagctgaactctttcatcacccagtattctactggccaagtcagcgtggagatcgagtgggagctgcagaaggaaaacagcaagcgctggaacccggagatccagtacacttccaactattacaagtctaataatgttgaatttgctgttaatactgaaggtgtatatagtgaaccccgccccattggcaccagatacctgactcgtaatctgtaa

SEQ ID NO: 154 - DNA, 2355 bp, Artificial Sequence
  LBV58
atggctgccgatggttatcttccggattggctcgaggacaaccttagtgaaggaattcgcgagtggtgggctttgaaacctggagcccctcaacccaaggcaaatcaacaacatcaagacaacgctcgaggtcttgtgcttccgggttacaaataccttggacccggcaacggactcgacaagggggagccggtcaacgcagcagacgcggcggccctcgagcacgacaaggcctacgaccagcagctcaaggccggagacaacccgtacctcaagtacaaccacgccgacgccgagttccaggagcggctcaaagaagatacgtcttttgggggcaacctcgggcgagcagtcttccaggccaaaaagaggcttcttgaacctcttggtctggttgaggaagcggctaagacggctcctggaaagaagaggcctgtagagcagtctcctcaggaaccggactcctccgcgggtattggcaaatcgggtgcacagcccgctaaaaagagactcaatttcggtcagactggcgacacagagtcagtcccagaccctcaaccaatcggagaacctcccgcagccccctcaggtgtgggatctcttacaatggcttcaggtggtggcgcaccagtggcagacaataacgaaggtgccgatggagtgggtagttcctcgggaaattggcattgcgattcccaatggctgggggacagagtcatcaccaccagcacccgaacctgggccctgcccacctacaacaatcacctctacaagcaaatctccaacagcacatctggaggatcttcaaatgacaacgcctacttcggctacagcaccccctgggggtattttgacttcaacagattccactgccacttctcaccacgtgactggcagcgactcatcaacaacaactggggattccggcctaagcgactcaacttcaagctcttcaacattcaggtcaaagaggttacggacaacaatggagtcaagaccatcgccaataaccttaccagcacggtccaggtcttcacggactcagactatcagctcccgtacgtgctcgggtcggctcacgagggctgcctcccgccgttcccagcggacgttttcatgattcctcagtacgggtatctgacgcttaatgatggaagccaggccgtgggtcgttcgtccttttactgcctggaatatttcccgtcgcaaatgctaagaacgggtaacaacttccagttcagctacgagtttgagaacgtacctttccatagcagctacgctcacagccaaagcctggaccgactaatgaatccactcatcgaccaatacttgtactatctctcaaagactattaacggttctggacagaatcaacaaacgctaaaattcagtgtggccggacccagcaacatggctgtccagggaagaaactacatacctggacccagctaccgacaacaacgtgtctcaaccactgtgactcaaaacaacaacagcgaatttgcttggcctggagcttcttcttgggctctcaatggacgtaatagcttgatgaatcctggacctgctatggccagccacaaagaaggagaggaccgtttctttcctttgtctggatctttaatttttggcaaacaaggaactggaagagacaacgtggatgcggacaaagtcatgataaccaacgaagaagaaattaaaactactaacccggtagcaacggagtcctatggacaagtggccacaaaccaccagagtgcccaaggtggtggtggatctggaggtggcgggtctggctgttcaaacagccggggagactataattctctctcttgttcacaagatagtgattgtcttgcgggatgtgtatgtggcccaaatgggttctgcggcggaggcggaggtagcgcacaggcgcagaccggctgggttcaaaaccaaggaatacttccgggtatggtttggcaggacagagatgtgtacctgcaaggacccatttgggccaaaattcctcacacggacggcaactttcacccttctccgctgatgggagggtttggaatgaagcacccgcctcctcagatcctcatcaaaaacacacctgtacctgcggatcctccaacggccttcaacaaggacaagctgaactctttcatcacccagtattctactggccaagtcagcgtggagatcgagtgggagctgcagaaggaaaacagcaagcgctggaacccggagatccagtacacttccaactattacaagtctaataatgttgaatttgctgttaatactgaaggtgtatatagtgaaccccgccccattggcaccagatacctgactcgtaatctgtaa

SEQ ID NO: 155 - DNA, 2310 bp, Artificial Sequence
  LBV59
atgtcgtttgttgatcaccctccggattggcttgaggagattggtgagggtctaaaggagtttttgggactcgaacctggcccacccaaaccgaagcccaaccagcagaagcaagacgacgcccgtggtcttgtactgcctggatataattacctgggacccggaaacggtctcgaccgcggagaacctgtcaaccgggctgacgaggtcgcgcgagagcacgacatctcgtacaacgagcagctccaggcgggagacaacccctacctcaagtacaaccacgcggacgccgagtttcaggagaagctcgcggacgacacctccttcgggggcaacctcggcaaggcagtctttcaggccaaaaaaagggttctcgaaccttttggcctggttgaggagcctgttaagacggctgctaaaggcgagcggatagacgaccactatcccaaaaagaagaaggctcggatcgaagagaccgaagctggaaccagcggagcccagcagctgcagatcccagcccaaccagcctcaagtttgggagctgatacaatgtctgcgggaggtggcagcccactgggcgacaataaccaaggcgccgatggagtgggcaatgcctcgggagattggcattgcgattccacgtggatgggggaccgagtcatcaccaagtccacccgaacctgggtgctgcccagctacaacaaccatcagtaccttgagatccacagcggttccgtcgacggaagcaacgctaacgcttattttggatacagcaccccctgggggtactttgacttcaaccgcttccacagccactggagcccccgagactggcagcgactcgtcaacaactactggggattcagaccccggtccctcaaggtcaagatctttaacatccaagtcaaggaagtcacgacgcaggacggcaccaccaccatcgccaacaacctcacctccaccgtccaagtgtttacggacaacgactaccagctaccgtacgtcatcggcaacggaacggaggggtgcctgccggccttccctccgcaggtctttacgctgccgcagtacggctacgcgacactgaaccgtaacaacaccgacgatcccaccgagcggagcagtttcttctgcctggaatactttcccagcaagatgctgcggacgggcaacaactttgaattcacctacagcttcgaggaggtgcccttccactgcagcttcgctcccagccagaacctcttcaagctggccaatccgctggtggaccagtacctgtaccgctttgtgagcaccgacacttccggtaacctacagttccaaaagaacttgaaggccagatatgccaacacttacaagaattggtttccggggcccatgtgccggacccagggctggtacacaagcgcgggcacatataacaacaaaggcgttgccaactttgatacttcaaacaagatggaactggagggggctagttaccaagtaaaccctcaaccaaatggaatgacaaacacgcttcaggatagtaacaaatacgcgcttgaaaacaccatgatcttcaacgcacagaacgcccctccgggaacgacctctctgtaccaggagaacaatcttttgataaccagcgagagcgagacgcagcctgtgaaccgattggcctacaacaccggtggtcaggtatcaaacaacaaccagaattcaaatggtggtggtggatctggaggtggcgggtcttcaaatagtcgaggtgactataactctcttggcggcggaggatctgaaaatcgacgaggtgactttaacaatacaggtgggggaggctccggtcgaggtgacctcagcacacctggaggcggaggtagcacacatcctacggtcggagtatacaatcaccaggaagtgttgcctggtagcgtgtggatggacagagacgtataccttcagggccccatctgggccaaaatcccggagacaggggcacactttcatccttctccggctatgggcggattcggactcaaacacccaccgcccatgatgctcatcaagaacacaccggtacctagcaacgtcgctgccttctctgacgtgcccgttaaaagcttcatcacccagtacagcaccggacaggtcacggtggagattgaatgggagctcaagaaagaaaactccaagaggtggaatcccgagatacagtacaccaacaactacaacaaccctacattcgtggactttgctccagacacctccggcgagtacaggactacgagggctattggaacccgttaccttacccgacccctgtaa

SEQ ID NO: 156 - DNA, 2610 bp, Artificial Sequence
  LBV60
atgtcgtttgttgatcaccctccggattggcttgaggagattggtgagggtctaaaggagtttttgggactcgaacctggcccacccaaaccgaagcccaaccagcagaagcaagacgacgcccgtggtcttgtactgcctggatataattacctgggacccggaaacggtctcgaccgcggagaacctgtcaaccgggctgacgaggtcgcgcgagagcacgacatctcgtacaacgagcagctccaggcgggagacaacccctacctcaagtacaaccacgcggacgccgagtttcaggagaagctcgcggacgacacctccttcgggggcaacctcggcaaggcagtctttcaggccaaaaaaagggttctcgaaccttttggcctggttgaggagcctgttaagacggctgctaaaggcgagcggatagacgaccactatcccaaaaagaagaaggctcggatcgaagagaccgaagctggaaccagcggagcccagcagctgcagatcccagcccaaccagcctcaagtttgggagctgatacaatgtctgcgggaggtggcagcccactgggcgacaataaccaaggcgccgatggagtgggcaatgcctcgggagattggcattgcgattccacgtggatgggggaccgagtcatcaccaagtccacccgaacctgggtgctgcccagctacaacaaccatcagtaccttgagatccacagcggttccgtcgacggaagcaacgctaacgcttattttggatacagcaccccctgggggtactttgacttcaaccgcttccacagccactggagcccccgagactggcagcgactcgtcaacaactactggggattcagaccccggtccctcaaggtcaagatctttaacatccaagtcaaggaagtcacgacgcaggacggcaccaccaccatcgccaacaacctcacctccaccgtccaagtgtttacggacaacgactaccagctaccgtacgtcatcggcaacggaacggaggggtgcctgccggccttccctccgcaggtctttacgctgccgcagtacggctacgcgacactgaaccgtaacaacaccgacgatcccaccgagcggagcagtttcttctgcctggaatactttcccagcaagatgctgcggacgggcaacaactttgaattcacctacagcttcgaggaggtgcccttccactgcagcttcgctcccagccagaacctcttcaagctggccaatccgctggtggaccagtacctgtaccgctttgtgagcaccgacacttccggtaacctacagttccaaaagaacttgaaggccagatatgccaacacttacaagaattggtttccggggcccatgtgccggacccagggctggtacacaagcgcgggcacatataacaacaaaggcgttgccaactttgatacttcaaacaagatggaactggagggggctagttaccaagtaaaccctcaaccaaatggaatgacaaacacgcttcaggatagtaacaaatacgcgcttgaaaacaccatgatcttcaacgcacagaacgcccctccgggaacgacctctctgtaccaggagaacaatcttttgataaccagcgagagcgagacgcagcctgtgaaccgattggcctacaacaccggtggtcaggtatcaaacaacaaccagaattcaaatggtggtggaggttcaggaggcggtggttctggcggaggaggtagtggtggcggtggatcaggcggaggtggaagtgaggtccaactccaggcaagcggaggaggattcgttcaagctggcggttctcttcgattgtcctgtgctgtatccggacgaggtgatctcagcacgcctagctatggtatgcattgggtccgacaagcaccgggtaaagagcgcgagtttgtagcggggataagccggggtgactacaattcactctattatgctgattccgtacaaggccgctttacaatttcacgagacaatgcgaagaacaccgtttatttgcagatgaatagtctgaagcccgaagatactgcaacgtattactgcgctgaaaatagaagaggcgatttcaataacacctactgggggcaagggactcaagtcacagtttcaagcggaggcggaggtagcacacatcctacggtcggagtatacaatcaccaggaagtgttgcctggtagcgtgtggatggacagagacgtataccttcagggccccatctgggccaaaatcccggagacaggggcacactttcatccttctccggctatgggcggattcggactcaaacacccaccgcccatgatgctcatcaagaacacaccggtacctagcaacgtcgctgccttctctgacgtgcccgttaaaagcttcatcacccagtacagcaccggacaggtcacggtggagattgaatgggagctcaagaaagaaaactccaagaggtggaatcccgagatacagtacaccaacaactacaacaaccctacattcgtggactttgctccagacacctccggcgagtacaggactacgagggctattggaacccgttaccttacccgacccctgtaa

SEQ ID NO: 157 - DNA, 2337 bp, Artificial Sequence
  LBV61
atgtcgtttgttgatcaccctccggattggcttgaggagattggtgagggtctaaaggagtttttgggactcgaacctggcccacccaaaccgaagcccaaccagcagaagcaagacgacgcccgtggtcttgtactgcctggatataattacctgggacccggaaacggtctcgaccgcggagaacctgtcaaccgggctgacgaggtcgcgcgagagcacgacatctcgtacaacgagcagctccaggcgggagacaacccctacctcaagtacaaccacgcggacgccgagtttcaggagaagctcgcggacgacacctccttcgggggcaacctcggcaaggcagtctttcaggccaaaaaaagggttctcgaaccttttggcctggttgaggagcctgttaagacggctgctaaaggcgagcggatagacgaccactatcccaaaaagaagaaggctcggatcgaagagaccgaagctggaaccagcggagcccagcagctgcagatcccagcccaaccagcctcaagtttgggagctgatacaatgtctgcgggaggtggcagcccactgggcgacaataaccaaggcgccgatggagtgggcaatgcctcgggagattggcattgcgattccacgtggatgggggaccgagtcatcaccaagtccacccgaacctgggtgctgcccagctacaacaaccatcagtaccttgagatccacagcggttccgtcgacggaagcaacgctaacgcttattttggatacagcaccccctgggggtactttgacttcaaccgcttccacagccactggagcccccgagactggcagcgactcgtcaacaactactggggattcagaccccggtccctcaaggtcaagatctttaacatccaagtcaaggaagtcacgacgcaggacggcaccaccaccatcgccaacaacctcacctccaccgtccaagtgtttacggacaacgactaccagctaccgtacgtcatcggcaacggaacggaggggtgcctgccggccttccctccgcaggtctttacgctgccgcagtacggctacgcgacactgaaccgtaacaacaccgacgatcccaccgagcggagcagtttcttctgcctggaatactttcccagcaagatgctgcggacgggcaacaactttgaattcacctacagcttcgaggaggtgcccttccactgcagcttcgctcccagccagaacctcttcaagctggccaatccgctggtggaccagtacctgtaccgctttgtgagcaccgacacttccggtaacctacagttccaaaagaacttgaaggccagatatgccaacacttacaagaattggtttccggggcccatgtgccggacccagggctggtacacaagcgcgggcacatataacaacaaaggcgttgccaactttgatacttcaaacaagatggaactggagggggctagttaccaagtaaaccctcaaccaaatggaatgacaaacacgcttcaggatagtaacaaatacgcgcttgaaaacaccatgatcttcaacgcacagaacgcccctccgggaacgacctctctgtaccaggagaacaatcttttgataaccagcgagagcgagacgcagcctgtgaaccgattggcctacaacaccggtggtcaggtatcaaacaacaaccagaattcaaatggtggtggtggatctggaggtggcgggtctaagttctgggccaccgtgggcagaggcgacctgagcacccccttcgaggtgcccgtgtacgccgagaccctggacgaggccctggagctggccgagaacagaagaggcgacttcaacaacaccgtgaccagagtgagacccggaggcggaggtagcacacatcctacggtcggagtatacaatcaccaggaagtgttgcctggtagcgtgtggatggacagagacgtataccttcagggccccatctgggccaaaatcccggagacaggggcacactttcatccttctccggctatgggcggattcggactcaaacacccaccgcccatgatgctcatcaagaacacaccggtacctagcaacgtcgctgccttctctgacgtgcccgttaaaagcttcatcacccagtacagcaccggacaggtcacggtggagattgaatgggagctcaagaaagaaaactccaagaggtggaatcccgagatacagtacaccaacaactacaacaaccctacattcgtggactttgctccagacacctccggcgagtacaggactacgagggctattggaacccgttaccttacccgacccctgtaa

SEQ ID NO: 158 - DNA, 2229 bp, Artificial Sequence
  LBV62
atgtcgtttgttgatcaccctccggattggcttgaggagattggtgagggtctaaaggagtttttgggactcgaacctggcccacccaaaccgaagcccaaccagcagaagcaagacgacgcccgtggtcttgtactgcctggatataattacctgggacccggaaacggtctcgaccgcggagaacctgtcaaccgggctgacgaggtcgcgcgagagcacgacatctcgtacaacgagcagctccaggcgggagacaacccctacctcaagtacaaccacgcggacgccgagtttcaggagaagctcgcggacgacacctccttcgggggcaacctcggcaaggcagtctttcaggccaaaaaaagggttctcgaaccttttggcctggttgaggagcctgttaagacggctgctaaaggcgagcggatagacgaccactatcccaaaaagaagaaggctcggatcgaagagaccgaagctggaaccagcggagcccagcagctgcagatcccagcccaaccagcctcaagtttgggagctgatacaatgtctgcgggaggtggcagcccactgggcgacaataaccaaggcgccgatggagtgggcaatgcctcgggagattggcattgcgattccacgtggatgggggaccgagtcatcaccaagtccacccgaacctgggtgctgcccagctacaacaaccatcagtaccttgagatccacagcggttccgtcgacggaagcaacgctaacgcttattttggatacagcaccccctgggggtactttgacttcaaccgcttccacagccactggagcccccgagactggcagcgactcgtcaacaactactggggattcagaccccggtccctcaaggtcaagatctttaacatccaagtcaaggaagtcacgacgcaggacggcaccaccaccatcgccaacaacctcacctccaccgtccaagtgtttacggacaacgactaccagctaccgtacgtcatcggcaacggaacggaggggtgcctgccggccttccctccgcaggtctttacgctgccgcagtacggctacgcgacactgaaccgtaacaacaccgacgatcccaccgagcggagcagtttcttctgcctggaatactttcccagcaagatgctgcggacgggcaacaactttgaattcacctacagcttcgaggaggtgcccttccactgcagcttcgctcccagccagaacctcttcaagctggccaatccgctggtggaccagtacctgtaccgctttgtgagcaccgacacttccggtaacctacagttccaaaagaacttgaaggccagatatgccaacacttacaagaattggtttccggggcccatgtgccggacccagggctggtacacaagcgcgggcacatataacaacaaaggcgttgccaactttgatacttcaaacaagatggaactggagggggctagttaccaagtaaaccctcaaccaaatggaatgacaaacacgcttcaggatagtaacaaatacgcgcttgaaaacaccatgatcttcaacgcacagaacgcccctccgggaacgacctctctgtaccaggagaacaatcttttgataaccagcgagagcgagacgcagcctgtgaaccgattggcctacaacaccggtggtcaggtatcaaacaacaaccagaattcaaatggtggtggtggagcatgccgaggtgactataactctctttgccgaggtgacctcagcacatgcggaggcggaggtagcacacatcctacggtcggagtatacaatcaccaggaagtgttgcctggtagcgtgtggatggacagagacgtataccttcagggccccatctgggccaaaatcccggagacaggggcacactttcatccttctccggctatgggcggattcggactcaaacacccaccgcccatgatgctcatcaagaacacaccggtacctagcaacgtcgctgccttctctgacgtgcccgttaaaagcttcatcacccagtacagcaccggacaggtcacggtggagattgaatgggagctcaagaaagaaaactccaagaggtggaatcccgagatacagtacaccaacaactacaacaaccctacattcgtggactttgctccagacacctccggcgagtacaggactacgagggctattggaacccgttaccttacccgacccctgtaa

SEQ ID NO: 159 - DNA, 2295 bp, Artificial Sequence
  LBV63
atgtcgtttgttgatcaccctccggattggcttgaggagattggtgagggtctaaaggagtttttgggactcgaacctggcccacccaaaccgaagcccaaccagcagaagcaagacgacgcccgtggtcttgtactgcctggatataattacctgggacccggaaacggtctcgaccgcggagaacctgtcaaccgggctgacgaggtcgcgcgagagcacgacatctcgtacaacgagcagctccaggcgggagacaacccctacctcaagtacaaccacgcggacgccgagtttcaggagaagctcgcggacgacacctccttcgggggcaacctcggcaaggcagtctttcaggccaaaaaaagggttctcgaaccttttggcctggttgaggagcctgttaagacggctgctaaaggcgagcggatagacgaccactatcccaaaaagaagaaggctcggatcgaagagaccgaagctggaaccagcggagcccagcagctgcagatcccagcccaaccagcctcaagtttgggagctgatacaatgtctgcgggaggtggcagcccactgggcgacaataaccaaggcgccgatggagtgggcaatgcctcgggagattggcattgcgattccacgtggatgggggaccgagtcatcaccaagtccacccgaacctgggtgctgcccagctacaacaaccatcagtaccttgagatccacagcggttccgtcgacggaagcaacgctaacgcttattttggatacagcaccccctgggggtactttgacttcaaccgcttccacagccactggagcccccgagactggcagcgactcgtcaacaactactggggattcagaccccggtccctcaaggtcaagatctttaacatccaagtcaaggaagtcacgacgcaggacggcaccaccaccatcgccaacaacctcacctccaccgtccaagtgtttacggacaacgactaccagctaccgtacgtcatcggcaacggaacggaggggtgcctgccggccttccctccgcaggtctttacgctgccgcagtacggctacgcgacactgaaccgtaacaacaccgacgatcccaccgagcggagcagtttcttctgcctggaatactttcccagcaagatgctgcggacgggcaacaactttgaattcacctacagcttcgaggaggtgcccttccactgcagcttcgctcccagccagaacctcttcaagctggccaatccgctggtggaccagtacctgtaccgctttgtgagcaccgacacttccggtaacctacagttccaaaagaacttgaaggccagatatgccaacacttacaagaattggtttccggggcccatgtgccggacccagggctggtacacaagcgcgggcacatataacaacaaaggcgttgccaactttgatacttcaaacaagatggaactggagggggctagttaccaagtaaaccctcaaccaaatggaatgacaaacacgcttcaggatagtaacaaatacgcgcttgaaaacaccatgatcttcaacgcacagaacgcccctccgggaacgacctctctgtaccaggagaacaatcttttgataaccagcgagagcgagacgcagcctgtgaaccgattggcctacaacaccggtggtcaggtatcaaacaacaaccagaattcaaatggtggtggtggatctggaggtggcgggtctggctgttcaaacagccggggagactataattctctctcttgttcacaagatagtgattgtcttgcgggatgtgtatgtggcccaaatgggttctgcggcggaggcggaggtagcacacatcctacggtcggagtatacaatcaccaggaagtgttgcctggtagcgtgtggatggacagagacgtataccttcagggccccatctgggccaaaatcccggagacaggggcacactttcatccttctccggctatgggcggattcggactcaaacacccaccgcccatgatgctcatcaagaacacaccggtacctagcaacgtcgctgccttctctgacgtgcccgttaaaagcttcatcacccagtacagcaccggacaggtcacggtggagattgaatgggagctcaagaaagaaaactccaagaggtggaatcccgagatacagtacaccaacaactacaacaaccctacattcgtggactttgctccagacacctccggcgagtacaggactacgagggctattggaacccgttaccttacccgacccctgtaa

SEQ ID NO: 160 - DNA, 2370 bp, Artificial Sequence; identical to SEQ ID NO: 150
  LBV64

SEQ ID NO: 161 - DNA, 2670 bp, Artificial Sequence; identical to SEQ ID NO: 151
  LBV65

SEQ ID NO: 162 - DNA, 2397 bp, Artificial Sequence; identical to SEQ ID NO: 152
  LBV66

SEQ ID NO: 163 - DNA, 2289 bp, Artificial Sequence; identical to SEQ ID NO: 153
  LBV67

SEQ ID NO: 164 - DNA, 2355 bp, Artificial Sequence; identical to SEQ ID NO: 154
  LBV68

SEQ ID NO: 165 - DNA, 2310 bp, Artificial Sequence; identical to SEQ ID NO: 155
  LBV69

SEQ ID NO: 166 - DNA, 2610 bp, Artificial Sequence; identical to SEQ ID NO: 156
  LBV70

SEQ ID NO: 167 - DNA, 2337 bp, Artificial Sequence; identical to SEQ ID NO: 157
  LBV71

SEQ ID NO: 168 - DNA, 2229 bp, Artificial Sequence; identical to SEQ ID NO: 158
  LBV72

SEQ ID NO: 169 - DNA, 2295 bp, Artificial Sequence; identical to SEQ ID NO: 159
  LBV73

SEQ ID NO: 170 - DNA, 2529 bp, Artificial Sequence; identical to SEQ ID NO: 135
  LBV76

SEQ ID NO: 171 - DNA, 2670 bp, Artificial Sequence
  LBV91
atggctgccgatggttatcttccggattggctcgaggacaaccttagtgaaggaattcgcgagtggtgggctttgaaacctggagcccctcaacccaaggcaaatcaacaacatcaagacaacgctcgaggtcttgtgcttccgggttacaaataccttggacccggcaacggactcgacaagggggagccggtcaacgcagcagacgcggcggccctcgagcacgacaaggcctacgaccagcagctcaaggccggagacaacccgtacctcaagtacaaccacgccgacgccgagttccaggagcggctcaaagaagatacgtcttttgggggcaacctcgggcgagcagtcttccaggccaaaaagaggcttcttgaacctcttggtctggttgaggaagcggctaagacggctcctggaaagaagaggcctgtagagcagtctcctcaggaaccggactcctccgcgggtattggcaaatcgggtgcacagcccgctaaaaagagactcaatttcggtcagactggcgacacagagtcagtcccagaccctcaaccaatcggagaacctcccgcagccccctcaggtgtgggatctcttacaatggcttcaggtggtggcgcaccagtggcagacaataacgaaggtgccgatggagtgggtagttcctcgggaaattggcattgcgattcccaatggctgggggacagagtcatcaccaccagcacccgaacctgggccctgcccacctacaacaatcacctctacaagcaaatctccaacagcacatctggaggatcttcaaatgacaacgcctacttcggctacagcaccccctgggggtattttgacttcaacagattccactgccacttctcaccacgtgactggcagcgactcatcaacaacaactggggattccggcctaagcgactcaacttcaagctcttcaacattcaggtcaaagaggttacggacaacaatggagtcaagaccatcgccaataaccttaccagcacggtccaggtcttcacggactcagactatcagctcccgtacgtgctcgggtcggctcacgagggctgcctcccgccgttcccagcggacgttttcatgattcctcagtacgggtatctgacgcttaatgatggaagccaggccgtgggtcgttcgtccttttactgcctggaatatttcccgtcgcaaatgctaagaacgggtaacaacttccagttcagctacgagtttgagaacgtacctttccatagcagctacgctcacagccaaagcctggaccgactaatgaatccactcatcgaccaatacttgtactatctctcaaagactattaacggttctggacagaatcaacaaacgctaaaattcagtgtggccggacccagcaacatggctgtccagggaagaaactacatacctggacccagctaccgacaacaacgtgtctcaaccactgtgactcaaaacaacaacagcgaaattgcttggcctcgagcttcttcttgggctctcaatggacgtaatagcttgatgaatcctggacctgctatggccagccacaaagaaggagaggaccgtttctttcctttgtctggatctttaatttttggcaaacaaggaactggaagagacaacgtggatgcggacaaagtcatgataaccaacgaagaagaaattaaaactactaacccggtagcaacggagtcctatggacaagtggccacaaaccaccagagtgcccaaggtggtggaggttcaggaggcggtggttctggcggaggaggtagtggtggcggtggatcaggcggaggtggaagtgaggtccaactccaggcaagcggaggaggattcgttcaagctggcggttctcttcgattgtcctgtgctgtatccggacgaggtgatctcagcacgcctagctatggtatgcattgggtccgacaagcaccgggtaaagagcgcgagtttgtagcggggataagccggggtgactacaattcactctattatgctgattccgtacaaggccgctttacaatttcacgagacaatgcgaagaacaccgtttatttgcagatgaatagtctgaagcccgaagatactgcaacgtattactgcgctgaaaatagaagaggcgatttcaataacacctactgggggcaagggactcaagtcacagtttcaagcggaggcggaggtagcgcacaggcgcagaccggctgggttcaaaaccaaggaatacttccgggtatggtttggcaggacagagatgtgtacctgcaaggacccatttgggccaaaattcctcacacggacggcaactttcacccttctccgctgatgggagggtttggaatgaagcacccgcctcctcagatcctcatcaaaaacacacctgtacctgcggatcctccaacggccttcaacaaggacaagctgaactctttcatcacccagtattctactggccaagtcagcgtggagatcgagtgggagctgcagaaggaaaacagcaagcgctggaacccggagatccagtacacttccaactattgcaagtctaataatgttgaatttgctgttaatactgaaggtgtatatagtgaaccccgccccattggcaccagatacctgactcgtaatctgtaa

SEQ ID NO: 172 - DNA, 2592 bp, Artificial Sequence
  LBV92
atggctgccgatggttatcttccggattggctcgaggacaacctctctgagggcattcgcgagtggtgggacttgaaacctggagccccgaaacccaaagccaaccagcaaaagcaggacaacggccggggtctggtgcttcctggctacaagtacctcggacccttcaacggactcgacaagggggagcccgtcaacgcggcggacgcagcggccctcgagcacgacaaggcctacgaccagcagctccaagcgggtgacaatccgtacctgcggtataaccacgccgacgccgagtttcaggagcgtctgcaagaagatacgtcttttgggggcaacctcgggcgagcagtcttccaggccaagaagcgggttctcgaacctctcggtctggttgagtctcctgtgaagacggctcctggaaagaagagaccggtagagccatcaccccagcgttctccagactcctctacgggcatcggcaagaaaggccagcagcccgcgaaaaagagactcaactttgggcagactggcgactcagagtcagtgcccgaccctcaaccaatcggagaaccccccgcaggcccctctggtctgggatctggtacaatggctgcaggcggtggcgctccaatggcagacaataacgaaggcgccgacggagtgggtagttcctcaggaaattggcattgcgattccacatggctgggcgacagagtcatcaccaccagcacccgaacctgggccctccccacctacaacaaccacctctacaagcaaatctccaacgggacttcgggaggaagcaccaacgacaacacctacttcggctacagcaccccctgggggtattttgactttaacagattccactgccacttctcaccacgtgactggcagcgactcatcaacaacaactggggattccggcccaagagactcaacttcaagctcttcaacatccaggtcaaggaggtcacgcagaatgaaggcaccaagaccatcgccaataaccttaccagcacgattcaggtctttacggactcggaataccagctcccgtacgtcctcggctctgcgcaccagggctgcctgcctccgttcccggcggacgtcttcatgattcctcagtacgggtacctgactctgaacaatggcagtcaggccgtgggccgttcctccttctactgcctggagtactttccttctcaaatgctgagaacgggcaacaactttgagttcagctacaactttgaggacgtgccttttcacagcagctacgcgcacagccaaagcctggaccggctgatgaaccccctcatcgaccagtacctgtactacctgtctcggactcagtccacgggaggtaccgcaggaactcagcagttgctattttctcaggccgggcctaataacatgtcggctcaggccaaaaactggctacccgggccctgctaccggcagcaacgcgtctccacgacactgtcgcaaaataacaacagcaacattgcctggacccgtgccaccaagtatcatctgaatggcagagactctctggtaaatcccggtgtcgctatggcaacccacaaggacgacgaagagcgattttttccgtccagcggagtcttaatgtttgggaaacagggagctggaaaagacaacgtggactatagcagcgttatgctaaccagtgaggaagaaattaaaaccaccaacccagtggccacagaacagtacggcgtggtggccgataacctgcaacagcaaggtggtggtggatctggaggtggcgggtctggcggcggaggatctggtgggggaggctccggaggcggaggtagcacccccttttatcctgtggggtacacggttaaacaaccaggcacatgtggcgatggagttcttcagcccggtgaggagtgcgacgatgggaacccagacgtatcagacggctgcatagactgtcacagagcttactgcggggatggataccgacaccagggggtagaagattgcgatggttcagactttggctacctcacttgtgagacgtaccttcccggctcatacggcgatttgcggtgtacgcaatactgtagcattgatagtacgccttgccgctattttaccggcgggggtggtgcagccgctcctattgtaggggccgtcaacagtcaaggagccttacctggcatggtctggcagaaccgggacgtgtacctgcagggtcctatctgggccaagattcctcacacggacggaaactttcatccctcgccgctgatgggaggctttggactgaaacacccgcctcctcagatcctgattaagaatacacctgttcccgcggatcctccaactaccttcaaccaagctaagctggcgtcgttcatcacgcagtacagcaccggacaggtcagcgtggaaattgaatgggagctgcagaaagaaaacagcaaacgctggaacccagagattcaatacacttccaactactgtaaatctacaaatgtggactttgctgttaacacagagggcacttattctgagcctcgccccatcggcacccgttacctcacccgtaatctgtaa

SEQ ID NO: 173 - DNA, 2592 bp, Artificial Sequence; identical to SEQ ID NO: 172
  LBV93

SEQ ID NO: 174 - DNA, 2244 bp, Artificial Sequence
  LBV94
atggctgccgatggttatcttccggattggctcgaggacaacctctctgagggcattcgcgagtggtgggacttgaaacctggagccccgaaacccaaagccaaccagcaaaagcaggacaacggccggggtctggtgcttcctggctacaagtacctcggacccttcaacggactcgacaagggggagcccgtcaacgcggcggacgcagcggccctcgagcacgacaaggcctacgaccagcagctccaagcgggtgacaatccgtacctgcggtataaccacgccgacgccgagtttcaggagcgtctgcaagaagatacgtcttttgggggcaacctcgggcgagcagtcttccaggccaagaagcgggttctcgaacctctcggtctggttgagtctcctgtgaagacggctcctggaaagaagagaccggtagagccatcaccccagcgttctccagactcctctacgggcatcggcaagaaaggccagcagcccgcgaaaaagagactcaactttgggcagactggcgactcagagtcagtgcccgaccctcaaccaatcggagaaccccccgcaggcccctctggtctgggatctggtacaatggctgcaggcggtggcgctccaatggcagacaataacgaaggcgccgacggagtgggtagttcctcaggaaattggcattgcgattccacatggctgggcgacagagtcatcaccaccagcacccgaacctgggccctccccacctacaacaaccacctctacaagcaaatctccaacgggacttcgggaggaagcaccaacgacaacacctacttcggctacagcaccccctgggggtattttgactttaacagattccactgccacttctcaccacgtgactggcagcgactcatcaacaacaactggggattccggcccaagagactcaacttcaagctcttcaacatccaggtcaaggaggtcacgcagaatgaaggcaccaagaccatcgccaataaccttaccagcacgattcaggtctttacggactcggaataccagctcccgtacgtcctcggctctgcgcaccagggctgcctgcctccgttcccggcggacgtcttcatgattcctcagtacgggtacctgactctgaacaatggcagtcaggccgtgggccgttcctccttctactgcctggagtactttccttctcaaatgctgagaacgggcaacaactttgagttcagctacaactttgaggacgtgccttttcacagcagctacgcgcacagccaaagcctggaccggctgatgaaccccctcatcgaccagtacctgtactacctgtctcggactcagtccacgggaggtaccgcaggaactcagcagttgctattttctcaggccgggcctaataacatgtcggctcaggccaaaaactggctacccgggccctgctaccggcagcaacgcgtctccacgacactgtcgcaaaataacaacagcaacattgcctggacccgtgccaccaagtatcatctgaatggcagagactctctggtaaatcccggtgtcgctatggcaacccacaaggacgacgaagagcgattttttccgtccagcggagtcttaatgtttgggaaacagggagctggaaaagacaacgtggactatagcagcgttatgctaaccagtgaggaagaaattaaaaccaccaacccagtggccacagaacagtacggcgtggtggccgataacctgcaacagcaatcaaacagccggggagactataattctctcgccgctcctattgtaggggccgtcaacagtcaaggagccttacctggcatggtctggcagaaccgggacgtgtacctgcagggtcctatctgggccaagattcctcacacggacggaaactttcatccctcgccgctgatgggaggctttggactgaaacacccgcctcctcagatcctgattaagaatacacctgttcccgcggatcctccaactaccttcaaccaagctaagctggcgtcgttcatcacgcagtacagcaccggacaggtcagcgtggaaattgaatgggagctgcagaaagaaaacagcaaacgctggaacccagagattcaatacacttccaactactgtaaatctacaaatgtggactttgctgttaacacagagggcacttattctgagcctcgccccatcggcacccgttacctcacccgtaatctgtaa

SEQ ID NO: 175 - DNA, 2385 bp, Artificial Sequence
  LBV95
atggctgccgatggttatcttccggattggctcgaggacaacctctctgagggcattcgcgagtggtgggacttgaaacctggagccccgaaacccaaagccaaccagcaaaagcaggacaacggccggggtctggtgcttcctggctacaagtacctcggacccttcaacggactcgacaagggggagcccgtcaacgcggcggacgcagcggccctcgagcacgacaaggcctacgaccagcagctccaagcgggtgacaatccgtacctgcggtataaccacgccgacgccgagtttcaggagcgtctgcaagaagatacgtcttttgggggcaacctcgggcgagcagtcttccaggccaagaagcgggttctcgaacctctcggtctggttgagtctcctgtgaagacggctcctggaaagaagagaccggtagagccatcaccccagcgttctccagactcctctacgggcatcggcaagaaaggccagcagcccgcgaaaaagagactcaactttgggcagactggcgactcagagtcagtgcccgaccctcaaccaatcggagaaccccccgcaggcccctctggtctgggatctggtacaatggctgcaggcggtggcgctccaatggcagacaataacgaaggcgccgacggagtgggtagttcctcaggaaattggcattgcgattccacatggctgggcgacagagtcatcaccaccagcacccgaacctgggccctccccacctacaacaaccacctctacaagcaaatctccaacgggacttcgggaggaagcaccaacgacaacacctacttcggctacagcaccccctgggggtattttgactttaacagattccactgccacttctcaccacgtgactggcagcgactcatcaacaacaactggggattccggcccaagagactcaacttcaagctcttcaacatccaggtcaaggaggtcacgcagaatgaaggcaccaagaccatcgccaataaccttaccagcacgattcaggtctttacggactcggaataccagctcccgtacgtcctcggctctgcgcaccagggctgcctgcctccgttcccggcggacgtcttcatgattcctcagtacgggtacctgactctgaacaatggcagtcaggccgtgggccgttcctccttctactgcctggagtactttccttctcaaatgctgagaacgggcaacaactttgagttcagctacaactttgaggacgtgccttttcacagcagctacgcgcacagccaaagcctggaccggctgatgaaccccctcatcgaccagtacctgtactacctgtctcggactcagtccacgggaggtaccgcaggaactcagcagttgctattttctcaggccgggcctaataacatgtcggctcaggccaaaaactggctacccgggccctgctaccggcagcaacgcgtctccacgacactgtcgcaaaataacaacagcaacattgcctggacccgtgccaccaagtatcatctgaatggcagagactctctggtaaatcccggtgtcgctatggcaacccacaaggacgacgaagagcgattttttccgtccagcggagtcttaatgtttgggaaacagggagctggaaaagacaacgtggactatagcagcgttatgctaaccagtgaggaagaaattaaaaccaccaacccagtggccacagaacagtacggcgtggtggccgataacctgcaacagcaaggtgggggcggaagtgaacttacaaacgaaataccggctggcgggggtggatcagagctcactaatgaaattcccgcaggtggcgggggcagtgaattgacaaatgagatcccggcaggaggtgggggctcagaactcacgaatgagatacctgcaggcggaggaggcagtgccgctcctattgtaggggccgtcaacagtcaaggagccttacctggcatggtctggcagaaccgggacgtgtacctgcagggtcctatctgggccaagattcctcacacggacggaaactttcatccctcgccgctgatgggaggctttggactgaaacacccgcctcctcagatcctgattaagaatacacctgttcccgcggatcctccaactaccttcaaccaagctaagctggcgtcgttcatcacgcagtacagcaccggacaggtcagcgtggaaattgaatgggagctgcagaaagaaaacagcaaacgctggaacccagagattcaatacacttccaactactgtaaatctacaaatgtggactttgctgttaacacagagggcacttattctgagcctcgccccatcggcacccgttacctcacccgtaatctgtaa

SEQ ID NO: 176 - DNA, 2820 bp, Artificial Sequence
  LBV96
atggctgccgatggttatcttccggattggctcgaggacaaccttagtgaaggaattcgcgagtggtgggctttgaaacctggagcccctcaacccaaggcaaatcaacaacatcaagacaacgctcgaggtcttgtgcttccgggttacaaataccttggacccggcaacggactcgacaagggggagccggtcaacgcagcagacgcggcggccctcgagcacgacaaggcctacgaccagcagctcaaggccggagacaacccgtacctcaagtacaaccacgccgacgccgagttccaggagcggctcaaagaagatacgtcttttgggggcaacctcgggcgagcagtcttccaggccaaaaagaggcttcttgaacctcttggtctggttgaggaagcggctaagacggctcctggaaagaagaggcctgtagagcagtctcctcaggaaccggactcctccgcgggtattggcaaatcgggtgcacagcccgctaaaaagagactcaatttcggtcagactggcgacacagagtcagtcccagaccctcaaccaatcggagaacctcccgcagccccctcaggtgtgggatctcttacaatggcttcaggtggtggcgcaccagtggcagacaataacgaaggtgccgatggagtgggtagttcctcgggaaattggcattgcgattcccaatggctgggggacagagtcatcaccaccagcacccgaacctgggccctgcccacctacaacaatcacctctacaagcaaatctccaacagcacatctggaggatcttcaaatgacaacgcctacttcggctacagcaccccctgggggtattttgacttcaacagattccactgccacttctcaccacgtgactggcagcgactcatcaacaacaactggggattccggcctaagcgactcaacttcaagctcttcaacattcaggtcaaagaggttacggacaacaatggagtcaagaccatcgccaataaccttaccagcacggtccaggtcttcacggactcagactatcagctcccgtacgtgctcgggtcggctcacgagggctgcctcccgccgttcccagcggacgttttcatgattcctcagtacgggtatctgacgcttaatgatggaagccaggccgtgggtcgttcgtccttttactgcctggaatatttcccgtcgcaaatgctaagaacgggtaacaacttccagttcagctacgagtttgagaacgtacctttccatagcagctacgctcacagccaaagcctggaccgactaatgaatccactcatcgaccaatacttgtactatctctcaaagactattaacggttctggacagaatcaacaaacgctaaaattcagtgtggccggacccagcaacatggctgtccagggaagaaactacatacctggacccagctaccgacaacaacgtgtctcaaccactgtgactcaaaacaacaacagcgaaattgcttggcctcgagcttcttcttgggctctcaatggacgtaatagcttgatgaatcctggacctgctatggccagccacaaagaaggagaggaccgtttctttcctttgtctggatctttaatttttggcaaacaaggaactggaagagacaacgtggatgcggacaaagtcatgataaccaacgaagaagaaattaaaactactaacccggtagcaacggagtcctatggacaagtggccacaaaccaccagagtgcccaaggtggtggaggttcaggaggcggtggttctggcggaggaggtagtggtggcggtggatcagttagtgtgaattttataaacaaagagtcttatcttcagattccttcagccaaggttcggcctcagacgaacataacacttcagattgccacagatgaagacagcggaatcctcctgtataagggtgacaaagaccatatcgcggtagaactctatcgggggcgtgttcgtgccagctatgacaccggctctcatccagcttctgccatttacagtgtggagacaatcaatgatggaaacttccacattgtggaactacttgccttggatcagagtctctctttgtccgtggatggtgggaaccccaaaatcatcactaacttgtcaaagcagtccactctgaattttgactctccactctatgtaggaggcatgccagggaagagtaacgtggcatctctgcgccaggcccctgggcagaacggaaccagcttccacggctgcatccggaacctttacatcaacagtgagctgcaggacttccagaaggtgccgatgcaaacaggcattttgcctggcggcggaggtggaagtggaggcggaggtagcgcacaggcgcagaccggctgggttcaaaaccaaggaatacttccgggtatggtttggcaggacagagatgtgtacctgcaaggacccatttgggccaaaattcctcacacggacggcaactttcacccttctccgctgatgggagggtttggaatgaagcacccgcctcctcagatcctcatcaaaaacacacctgtacctgcggatcctccaacggccttcaacaaggacaagctgaactctttcatcacccagtattctactggccaagtcagcgtggagatcgagtgggagctgcagaaggaaaacagcaagcgctggaacccggagatccagtacacttccaactattgcaagtctaataatgttgaatttgctgttaatactgaaggtgtatatagtgaaccccgccccattggcaccagatacctgactcgtaatctgtaa

SEQ ID NO: 177 - DNA, 2820 bp, Artificial Sequence; identical to SEQ ID NO: 176
  LBV97

SEQ ID NO: 178 - DNA, 2820 bp, Artificial Sequence
  LBV98
atggctgccgatggttatcttccggattggctcgaggacaaccttagtgaaggaattcgcgagtggtgggctttgaaacctggagcccctcaacccaaggcaaatcaacaacatcaagacaacgctcgaggtcttgtgcttccgggttacaaataccttggacccggcaacggactcgacaagggggagccggtcaacgcagcagacgcggcggccctcgagcacgacaaggcctacgaccagcagctcaaggccggagacaacccgtacctcaagtacaaccacgccgacgccgagttccaggagcggctcaaagaagatacgtcttttgggggcaacctcgggcgagcagtcttccaggccaaaaagaggcttcttgaacctcttggtctggttgaggaagcggctaagacggctcctggaaagaagaggcctgtagagcagtctcctcaggaaccggactcctccgcgggtattggcaaatcgggtgcacagcccgctaaaaagagactcaatttcggtcagactggcgacacagagtcagtcccagaccctcaaccaatcggagaacctcccgcagccccctcaggtgtgggatctcttacaatggcttcaggtggtggcgcaccagtggcagacaataacgaaggtgccgatggagtgggtagttcctcgggaaattggcattgcgattcccaatggctgggggacagagtcatcaccaccagcacccgaacctgggccctgcccacctacaacaatcacctctacaagcaaatctccaacagcacatctggaggatcttcaaatgacaacgcctacttcggctacagcaccccctgggggtattttgacttcaacagattccactgccacttctcaccacgtgactggcagcgactcatcaacaacaactggggattccggcctaagcgactcaacttcaagctcttcaacattcaggtcaaagaggttacggacaacaatggagtcaagaccatcgccaataaccttaccagcacggtccaggtcttcacggactcagactatcagctcccgtacgtgctcgggtcggctcacgagggctgcctcccgccgttcccagcggacgttttcatgattcctcagtacgggtatctgacgcttaatgatggaagccaggccgtgggtcgttcgtccttttactgcctggaatatttcccgtcgcaaatgctaagaacgggtaacaacttccagttcagctacgagtttgagaacgtacctttccatagcagctacgctcacagccaaagcctggaccgactaatgaatccactcatcgaccaatacttgtactatctctcaaagactattaacggttctggacagaatcaacaaacgctaaaattcagtgtggccggacccagcaacatggctgtccagggaagaaactacatacctggacccagctaccgacaacaacgtgtctcaaccactgtgactcaaaacaacaacagcgaatttgcttggcctggagcttcttcttgggctctcaatggacgtaatagcttgatgaatcctggacctgctatggccagccacaaagaaggagaggaccgtttctttcctttgtctggatctttaatttttggcaaacaaggaactggaagagacaacgtggatgcggacaaagtcatgataaccaacgaagaagaaattaaaactactaacccggtagcaacggagtcctatggacaagtggccacaaaccaccagagtgcccaaggtggtggaggttcaggaggcggtggttctggcggaggaggtagtggtggcggtggatcagttagtgtgaattttataaacaaagagtcttatcttcagattccttcagccaaggttcggcctcagacgaacataacacttcagattgccacagatgaagacagcggaatcctcctgtataagggtgacaaagaccatatcgcggtagaactctatcgggggcgtgttcgtgccagctatgacaccggctctcatccagcttctgccatttacagtgtggagacaatcaatgatggaaacttccacattgtggaactacttgccttggatcagagtctctctttgtccgtggatggtgggaaccccaaaatcatcactaacttgtcaaagcagtccactctgaattttgactctccactctatgtaggaggcatgccagggaagagtaacgtggcatctctgcgccaggcccctgggcagaacggaaccagcttccacggctgcatccggaacctttacatcaacagtgagctgcaggacttccagaaggtgccgatgcaaacaggcattttgcctggcggcggaggtggaagtggaggcggaggtagcgcacaggcgcagaccggctgggttcaaaaccaaggaatacttccgggtatggtttggcaggacagagatgtgtacctgcaaggacccatttgggccaaaattcctcacacggacggcaactttcacccttctccgctgatgggagggtttggaatgaagcacccgcctcctcagatcctcatcaaaaacacacctgtacctgcggatcctccaacggccttcaacaaggacaagctgaactctttcatcacccagtattctactggccaagtcagcgtggagatcgagtgggagctgcagaaggaaaacagcaagcgctggaacccggagatccagtacacttccaactattacaagtctaataatgttgaatttgctgttaatactgaaggtgtatatagtgaaccccgccccattggcaccagatacctgactcgtaatctgtaa

SEQ ID NO: 179 - DNA, 2823 bp, Artificial Sequence
  LBV99
atggctgccgatggttatcttccggattggctcgaggacaacctctctgagggcattcgcgagtggtgggacttgaaacctggagccccgaaacccaaagccaaccagcaaaagcaggacaacggccggggtctggtgcttcctggctacaagtacctcggacccttcaacggactcgacaagggggagcccgtcaacgcggcggacgcagcggccctcgagcacgacaaggcctacgaccagcagctccaagcgggtgacaatccgtacctgcggtataaccacgccgacgccgagtttcaggagcgtctgcaagaagatacgtcttttgggggcaacctcgggcgagcagtcttccaggccaagaagcgggttctcgaacctctcggtctggttgagtctcctgtgaagacggctcctggaaagaagagaccggtagagccatcaccccagcgttctccagactcctctacgggcatcggcaagaaaggccagcagcccgcgaaaaagagactcaactttgggcagactggcgactcagagtcagtgcccgaccctcaaccaatcggagaaccccccgcaggcccctctggtctgggatctggtacaatggctgcaggcggtggcgctccaatggcagacaataacgaaggcgccgacggagtgggtagttcctcaggaaattggcattgcgattccacatggctgggcgacagagtcatcaccaccagcacccgaacctgggccctccccacctacaacaaccacctctacaagcaaatctccaacgggacttcgggaggaagcaccaacgacaacacctacttcggctacagcaccccctgggggtattttgactttaacagattccactgccacttctcaccacgtgactggcagcgactcatcaacaacaactggggattccggcccaagagactcaacttcaagctcttcaacatccaggtcaaggaggtcacgcagaatgaaggcaccaagaccatcgccaataaccttaccagcacgattcaggtctttacggactcggaataccagctcccgtacgtcctcggctctgcgcaccagggctgcctgcctccgttcccggcggacgtcttcatgattcctcagtacgggtacctgactctgaacaatggcagtcaggccgtgggccgttcctccttctactgcctggagtactttccttctcaaatgctgagaacgggcaacaactttgagttcagctacaactttgaggacgtgccttttcacagcagctacgcgcacagccaaagcctggaccggctgatgaaccccctcatcgaccagtacctgtactacctgtctcggactcagtccacgggaggtaccgcaggaactcagcagttgctattttctcaggccgggcctaataacatgtcggctcaggccaaaaactggctacccgggccctgctaccggcagcaacgcgtctccacgacactgtcgcaaaataacaacagcaacattgcctggacccgtgccaccaagtatcatctgaatggcagagactctctggtaaatcccggtgtcgctatggcaacccacaaggacgacgaagagcgattttttccgtccagcggagtcttaatgtttgggaaacagggagctggaaaagacaacgtggactatagcagcgttatgctaaccagtgaggaagaaattaaaaccaccaacccagtggccacagaacagtacggcgtggtggccgataacctgcaacagcaaggtggtggaggttcaggaggcggtggttctggcggaggaggtagtggtggcggtggatcagttagtgtgaattttataaacaaagagtcttatcttcagattccttcagccaaggttcggcctcagacgaacataacacttcagattgccacagatgaagacagcggaatcctcctgtataagggtgacaaagaccatatcgcggtagaactctatcgggggcgtgttcgtgccagctatgacaccggctctcatccagcttctgccatttacagtgtggagacaatcaatgatggaaacttccacattgtggaactacttgccttggatcagagtctctctttgtccgtggatggtgggaaccccaaaatcatcactaacttgtcaaagcagtccactctgaattttgactctccactctatgtaggaggcatgccagggaagagtaacgtggcatctctgcgccaggcccctgggcagaacggaaccagcttccacggctgcatccggaacctttacatcaacagtgagctgcaggacttccagaaggtgccgatgcaaacaggcattttgcctggcggcggaggtggaagtggaggcggaggtagcgccgctcctattgtaggggccgtcaacagtcaaggagccttacctggcatggtctggcagaaccgggacgtgtacctgcagggtcctatctgggccaagattcctcacacggacggaaactttcatccctcgccgctgatgggaggctttggactgaaacacccgcctcctcagatcctgattaagaatacacctgttcccgcggatcctccaactaccttcaaccaagctaagctggcgtcgttcatcacgcagtacagcaccggacaggtcagcgtggaaattgaatgggagctgcagaaagaaaacagcaaacgctggaacccagagattcaatacacttccaactactgtaaatctacaaatgtggactttgctgttaacacagagggcacttattctgagcctcgccccatcggcacccgttacctcacccgtaatctgtaa

SEQ ID NO: 180 - DNA, 2823 bp, Artificial Sequence; identical to SEQ ID NO: 179
  LBV100

SEQ ID NO: 181 - DNA, 1806 bp, Artificial Sequence
  LBV29
acggctcctggaaagaagagaccggtagagccatcaccccagcgttctccagactcctctacgggcatcggcaagaaaggccagcagcccgcgaaaaagagactcaactttgggcagactggcgactcagagtcagtgcccgaccctcaaccaatcggagaaccccccgcaggcccctctggtctgggatctggtacaatggctgcaggcggtggcgctccaatggcagacaataacgaaggcgccgacggagtgggtagttcctcaggaaattggcattgcgattccacatggctgggcgacagagtcatcaccaccagcacccgaacctgggccctccccacctacaacaaccacctctacaagcaaatctccaacgggacttcgggaggaagcaccaacgacaacacctacttcggctacagcaccccctgggggtattttgactttaacagattccactgccacttctcaccacgtgactggcagcgactcatcaacaacaactggggattccggcccaagagactcaacttcaagctcttcaacatccaggtcaaggaggtcacgcagaatgaaggcaccaagaccatcgccaataaccttaccagcacgattcaggtctttacggactcggaataccagctcccgtacgtcctcggctctgcgcaccagggctgcctgcctccgttcccggcggacgtcttcatgattcctcagtacgggtacctgactctgaacaatggcagtcaggccgtgggccgttcctccttctactgcctggagtactttccttctcaaatgctgagaacgggcaacaactttgagttcagctacaactttgaggacgtgccttttcacagcagctacgcgcacagccaaagcctggaccggctgatgaaccccctcatcgaccagtacctgtactacctgtctcggactcagtccacgggaggtaccgcaggaactcagcagttgctattttctcaggccgggcctaataacatgtcggctcaggccaaaaactggctacccgggccctgctaccggcagcaacgcgtctccacgacactgtcgcaaaataacaacagcaactttgcctggaccggtgccaccaagtatcatctgaatggcagagactctctggtaaatcccggtgtcgctatggcaacccacaaggacgacgaagagcgattttttccgtccagcggagtcttaatgtttgggaaacagggagctggaaaagacaacgtggactatagcagcgttatgctaaccagtgaggaagaaattaaaaccaccaacccagtggccacagaacagtacggcgtggtggccgataacctgcaacagcaaaacgccgctcctattgtaggggccgtcaacagtcaaggagccttacctggcatggtctggcagaaccgggacgtgtacctgcagggtcctatctgggccaagattcctcacacggacggaaactttcatccctcgccgctgatgggaggctttggactgaaacacccgcctcctcagatcctgattaagaatacacctgttcccgcggatcctccaactaccttcaaccaagctaagctggcgtcgttcatcacgcagtacagcaccggacaggtcagcgtggaaattgaatgggagctgcagaaagaaaacagcaaacgctggaacccagagattcaatacacttccaactactacaaatctacaaatgtggactttgctgttaacacagagggcacttattctgagcctcgccccatcggcacccgttacctcacccgtaatctgtaa

SEQ ID NO: 182 - DNA, 1839 bp, Artificial Sequence
  LBV30
acggctcctggaaagaagagaccggtagagccatcaccccagcgttctccagactcctctacgggcatcggcaagaaaggccagcagcccgcgaaaaagagactcaactttgggcagactggcgactcagagtcagtgcccgaccctcaaccaatcggagaaccccccgcaggcccctctggtctgggatctggtacaatggctgcaggcggtggcgctccaatggcagacaataacgaaggcgccgacggagtgggtagttcctcaggaaattggcattgcgattccacatggctgggcgacagagtcatcaccaccagcacccgaacctgggccctccccacctacaacaaccacctctacaagcaaatctccaacgggacttcgggaggaagcaccaacgacaacacctacttcggctacagcaccccctgggggtattttgactttaacagattccactgccacttctcaccacgtgactggcagcgactcatcaacaacaactggggattccggcccaagagactcaacttcaagctcttcaacatccaggtcaaggaggtcacgcagaatgaaggcaccaagaccatcgccaataaccttaccagcacgattcaggtctttacggactcggaataccagctcccgtacgtcctcggctctgcgcaccagggctgcctgcctccgttcccggcggacgtcttcatgattcctcagtacgggtacctgactctgaacaatggcagtcaggccgtgggccgttcctccttctactgcctggagtactttccttctcaaatgctgagaacgggcaacaactttgagttcagctacaactttgaggacgtgccttttcacagcagctacgcgcacagccaaagcctggaccggctgatgaaccccctcatcgaccagtacctgtactacctgtctcggactcagtccacgggaggtaccgcaggaactcagcagttgctattttctcaggccgggcctaataacatgtcggctcaggccaaaaactggctacccgggccctgctaccggcagcaacgcgtctccacgacactgtcgcaaaataacaacagcaactttgcctggaccggtgccaccaagtatcatctgaatggcagagactctctggtaaatcccggtgtcgctatggcaacccacaaggacgacgaagagcgattttttccgtccagcggagtcttaatgtttgggaaacagggagctggaaaagacaacgtggactatagcagcgttatgctaaccagtgaggaagaaattaaaaccaccaacccagtggccacagaacagtacggcgtggtggccgataacctgcaacagcaaggaagtggtcgaggtgacctcggtctttctggtggagccgctcctattgtaggggccgtcaacagtcaaggagccttacctggcatggtctggcagaaccgggacgtgtacctgcagggtcctatctgggccaagattcctcacacggacggaaactttcatccctcgccgctgatgggaggctttggactgaaacacccgcctcctcagatcctgattaagaatacacctgttcccgcggatcctccaactaccttcaaccaagctaagctggcgtcgttcatcacgcagtacagcaccggacaggtcagcgtggaaattgaatgggagctgcagaaagaaaacagcaaacgctggaacccagagattcaatacacttccaactactacaaatctacaaatgtggactttgctgttaacacagagggcacttattctgagcctcgccccatcggcacccgttacctcacccgtaatctgtaa

SEQ ID NO: 183 - DNA, 1779 bp, Artificial Sequence
  LBV31
acggctgctaaaggcgagcggatagacgaccactatcccaaaaagaagaaggctcggatcgaagagaccgaagctggaaccagcggagcccagcagctgcagatcccagcccaaccagcctcaagtttgggagctgatacaatgtctgcgggaggtggcagcccactgggcgacaataaccaaggcgccgatggagtgggcaatgcctcgggagattggcattgcgattccacgtggatgggggaccgagtcatcaccaagtccacccgaacctgggtgctgcccagctacaacaaccatcagtaccttgagatccacagcggttccgtcgacggaagcaacgctaacgcttattttggatacagcaccccctgggggtactttgacttcaaccgcttccacagccactggagcccccgagactggcagcgactcgtcaacaactactggggattcagaccccggtccctcaaggtcaagatctttaacatccaagtcaaggaagtcacgacgcaggacggcaccaccaccatcgccaacaacctcacctccaccgtccaagtgtttacggacaacgactaccagctaccgtacgtcatcggcaacggaacggaggggtgcctgccggccttccctccgcaggtctttacgctgccgcagtacggctacgcgacactgaaccgtaacaacaccgacgatcccaccgagcggagcagtttcttctgcctggaatactttcccagcaagatgctgcggacgggcaacaactttgaattcacctacagcttcgaggaggtgcccttccactgcagcttcgctcccagccagaacctcttcaagctggccaatccgctggtggaccagtacctgtaccgctttgtgagcaccgacacttccggtaacctacagttccaaaagaacttgaaggccagatatgccaacacttacaagaattggtttccggggcccatgtgccggacccagggctggtacacaagcgcgggcacatataacaacaaaggcgttgccaactttgatacttcaaacaagatggaactggagggggctagttaccaagtaaaccctcaaccaaatggaatgacaaacacgcttcaggatagtaacaaatacgcgcttgaaaacaccatgatcttcaacgcacagaacgcccctccgggaacgacctctctgtaccaggagaacaatcttttgataaccagcgagagcgagacgcagcctgtgaaccgattggcctacaacaccggtggtcaggtatcaaacaacaaccagaattcaaatggaagtggtcgaggtgacctcggtctttctggtggaacacatcctacggtcggagtatacaatcaccaggaagtgttgcctggtagcgtgtggatggacagagacgtataccttcagggccccatctgggccaaaatcccggagacaggggcacactttcatccttctccggctatgggcggattcggactcaaacacccaccgcccatgatgctcatcaagaacacaccggtacctagcaacgtcgctgccttctctgacgtgcccgttaaaagcttcatcacccagtacagcaccggacaggtcacggtggagattgaatgggagctcaagaaagaaaactccaagaggtggaatcccgagatacagtacaccaacaactacaacaaccctacattcgtggactttgctccagacacctccggcgagtacaggactacgagggctattggaacccgttaccttacccgacccctgtaa

SEQ ID NO: 184 - DNA, 1779 bp, Artificial Sequence; identical to SEQ ID NO: 183
  LBV32

SEQ ID NO: 185 - DNA, 1779 bp, Artificial Sequence
  LBV33
acggctgctggtaagaaacggatagacgaccactatcccaaaaagaagaaggctcggatcgaagagaccgaagctggaaccagcggagcccagcagctgcagatcccagcccaaccagcctcaagtttgggagctgatacaatgtctgcgggaggtggcagcccactgggcgacaataaccaaggcgccgatggagtgggcaatgcctcgggagattggcattgcgattccacgtggatgggggaccgagtcatcaccaagtccacccgaacctgggtgctgcccagctacaacaaccatcagtaccttgagatccacagcggttccgtcgacggaagcaacgctaacgcttattttggatacagcaccccctgggggtactttgacttcaaccgcttccacagccactggagcccccgagactggcagcgactcgtcaacaactactggggattcagaccccggtccctcaaggtcaagatctttaacatccaagtcaaggaagtcacgacgcaggacggcaccaccaccatcgccaacaacctcacctccaccgtccaagtgtttacggacaacgactaccagctaccgtacgtcatcggcaacggaacggaggggtgcctgccggccttccctccgcaggtctttacgctgccgcagtacggctacgcgacactgaaccgtaacaacaccgacgatcccaccgagcggagcagtttcttctgcctggaatactttcccagcaagatgctgcggacgggcaacaactttgaattcacctacagcttcgaggaggtgcccttccactgcagcttcgctcccagccagaacctcttcaagctggccaatccgctggtggaccagtacctgtaccgctttgtgagcaccgacacttccggtaacctacagttccaaaagaacttgaaggccagatatgccaacacttacaagaattggtttccggggcccatgtgccggacccagggctggtacacaagcgcgggcacatataacaacaaaggcgttgccaactttgatacttcaaacaagatggaactggagggggctagttaccaagtaaaccctcaaccaaatggaatgacaaacacgcttcaggatagtaacaaatacgcgcttgaaaacaccatgatcttcaacgcacagaacgcccctccgggaacgacctctctgtaccaggagaacaatcttttgataaccagcgagagcgagacgcagcctgtgaaccgattggcctacaacaccggtggtcaggtatcaaacaacaaccagaattcaaatggaagtggtcgaggtgacctcggtctttctggtggaacacatcctacggtcggagtatacaatcaccaggaagtgttgcctggtagcgtgtggatggacagagacgtataccttcagggccccatctgggccaaaatcccggagacaggggcacactttcatccttctccggctatgggcggattcggactcaaacacccaccgcccatgatgctcatcaagaacacaccggtacctagcaacgtcgctgccttctctgacgtgcccgttaaaagcttcatcacccagtacagcaccggacaggtcacggtggagattgaatgggagctcaagaaagaaaactccaagaggtggaatcccgagatacagtacaccaacaactacaacaaccctacattcgtggactttgctccagacacctccggcgagtacaggactacgagggctattggaacccgttaccttacccgacccctgtaa

SEQ ID NO: 186 - DNA, 1779 bp, Artificial Sequence; identical to SEQ ID NO: 183
  LBV34

SEQ ID NO: 187 - DNA, 1779 bp, Artificial Sequence; identical to SEQ ID NO: 183
  LBV35

SEQ ID NO: 188 - DNA, 1836 bp, Artificial Sequence
  LBV41
acggctcctggaaagaagaggcctgtagagcagtctcctcaggaaccggactcctccgcgggtattggcaaatcgggtgcacagcccgctaaaaagagactcaatttcggtcagactggcgacacagagtcagtcccagaccctcaaccaatcggagaacctcccgcagccccctcaggtgtgggatctcttacaatggcttcaggtggtggcgcaccagtggcagacaataacgaaggtgccgatggagtgggtagttcctcgggaaattggcattgcgattcccaatggctgggggacagagtcatcaccaccagcacccgaacctgggccctgcccacctacaacaatcacctctacaagcaaatctccaacagcacatctggaggatcttcaaatgacaacgcctacttcggctacagcaccccctgggggtattttgacttcaacagattccactgccacttctcaccacgtgactggcagcgactcatcaacaacaactggggattccggcctaagcgactcaacttcaagctcttcaacattcaggtcaaagaggttacggacaacaatggagtcaagaccatcgccaataaccttaccagcacggtccaggtcttcacggactcagactatcagctcccgtacgtgctcgggtcggctcacgagggctgcctcccgccgttcccagcggacgttttcatgattcctcagtacgggtatctgacgcttaatgatggaagccaggccgtgggtcgttcgtccttttactgcctggaatatttcccgtcgcaaatgctaagaacgggtaacaacttccagttcagctacgagtttgagaacgtacctttccatagcagctacgctcacagccaaagcctggaccgactaatgaatccactcatcgaccaatacttgtactatctctcaaagactattaacggttctggacagaatcaacaaacgctaaaattcagtgtggccggacccagcaacatggctgtccagggaagaaactacatacctggacccagctaccgacaacaacgtgtctcaaccactgtgactcaaaacaacaacagcgaatttgcttggcctggagcttcttcttgggctctcaatggacgtaatagcttgatgaatcctggacctgctatggccagccacaaagaaggagaggaccgtttctttcctttgtctggatctttaatttttggcaaacaaggaactggaagagacaacgtggatgcggacaaagtcatgataaccaacgaagaagaaattaaaactactaacccggtagcaacggagtcctatggacaagtggccacaaaccaccagagtgcccaaggaagtggtcgaggtgacctcggtctttctggtggagcacaggcgcagaccggctgggttcaaaaccaaggaatacttccgggtatggtttggcaggacagagatgtgtacctgcaaggacccatttgggccaaaattcctcacacggacggcaactttcacccttctccgctgatgggagggtttggaatgaagcacccgcctcctcagatcctcatcaaaaacacacctgtacctgcggatcctccaacggccttcaacaaggacaagctgaactctttcatcacccagtattctactggccaagtcagcgtggagatcgagtgggagctgcagaaggaaaacagcaagcgctggaacccggagatccagtacacttccaactattacaagtctaataatgttgaatttgctgttaatactgaaggtgtatatagtgaaccccgccccattggcaccagatacctgactcgtaatctgtaa

SEQ ID NO: 189 - DNA, 1836 bp, Artificial Sequence; identical to SEQ ID NO: 188
  LBV42

SEQ ID NO: 190 - DNA, 1836 bp, Artificial Sequence; identical to SEQ ID NO: 188
  LBV43

SEQ ID NO: 191 - DNA, 1839 bp, Artificial Sequence; identical to SEQ ID NO: 182
  LBV44

SEQ ID NO: 192 - DNA, 1839 bp, Artificial Sequence; identical to SEQ ID NO: 182
  LBV45

SEQ ID NO: 193 - DNA, 1839 bp, Artificial Sequence; identical to SEQ ID NO: 182
  LBV46

SEQ ID NO: 194 - DNA, 1839 bp, Artificial Sequence; identical to SEQ ID NO: 182
  LBV47

SEQ ID NO: 195 - DNA, 1779 bp, Artificial Sequence; identical to SEQ ID NO: 183
  LBV48

SEQ ID NO: 196 - DNA, 1767 bp, Artificial Sequence
  LBV49
acggctgctaaaggcgagcggatagacgaccactatcccaaaaagaagaaggctcggatcgaagagaccgaagctggaaccagcggagcccagcagctgcagatcccagcccaaccagcctcaagtttgggagctgatacaatgtctgcgggaggtggcagcccactgggcgacaataaccaaggcgccgatggagtgggcaatgcctcgggagattggcattgcgattccacgtggatgggggaccgagtcatcaccaagtccacccgaacctgggtgctgcccagctacaacaaccatcagtaccttgagatccacagcggttccgtcgacggaagcaacgctaacgcttattttggatacagcaccccctgggggtactttgacttcaaccgcttccacagccactggagcccccgagactggcagcgactcgtcaacaactactggggattcagaccccggtccctcaaggtcaagatctttaacatccaagtcaaggaagtcacgacgcaggacggcaccaccaccatcgccaacaacctcacctccaccgtccaagtgtttacggacaacgactaccagctaccgtacgtcatcggcaacggaacggaggggtgcctgccggccttccctccgcaggtctttacgctgccgcagtacggctacgcgacactgaaccgtaacaacaccgacgatcccaccgagcggagcagtttcttctgcctggaatactttcccagcaagatgctgcggacgggcaacaactttgaattcacctacagcttcgaggaggtgcccttccactgcagcttcgctcccagccagaacctcttcaagctggccaatccgctggtggaccagtacctgtaccgctttgtgagcaccgacacttccggtaacctacagttccaaaagaacttgaaggccagatatgccaacacttacaagaattggtttccggggcccatgtgccggacccagggctggtacacaagcgcgggcacatataacaacaaaggcgttgccaactttgatacttcaaacaagatggaactggagggggctagttaccaagtaaaccctcaaccaaatggaatgacaaacacgcttcaggatagtaacaaatacgcgcttgaaaacaccatgatcttcaacgcacagaacgcccctccgggaacgacctctctgtaccaggagaacaatcttttgataaccagcgagagcgagacgcagcctgtgaaccgattggcctacaacaccggtggtcaggtatcaaacaacaaccagaattcaaatagtcgaggtgactataactctcttacacatcctacggtcggagtatacaatcaccaggaagtgttgcctggtagcgtgtggatggacagagacgtataccttcagggccccatctgggccaaaatcccggagacaggggcacactttcatccttctccggctatgggcggattcggactcaaacacccaccgcccatgatgctcatcaagaacacaccggtacctagcaacgtcgctgccttctctgacgtgcccgttaaaagcttcatcacccagtacagcaccggacaggtcacggtggagattgaatgggagctcaagaaagaaaactccaagaggtggaatcccgagatacagtacaccaacaactacaacaaccctacattcgtggactttgctccagacacctccggcgagtacaggactacgagggctattggaacccgttaccttacccgacccctgtaa

SEQ ID NO: 197 - DNA, 1767 bp, Artificial Sequence
  LBV50
acggctgctggtaagaaacggatagacgaccactatcccaaaaagaagaaggctcggatcgaagagaccgaagctggaaccagcggagcccagcagctgcagatcccagcccaaccagcctcaagtttgggagctgatacaatgtctgcgggaggtggcagcccactgggcgacaataaccaaggcgccgatggagtgggcaatgcctcgggagattggcattgcgattccacgtggatgggggaccgagtcatcaccaagtccacccgaacctgggtgctgcccagctacaacaaccatcagtaccttgagatccacagcggttccgtcgacggaagcaacgctaacgcttattttggatacagcaccccctgggggtactttgacttcaaccgcttccacagccactggagcccccgagactggcagcgactcgtcaacaactactggggattcagaccccggtccctcaaggtcaagatctttaacatccaagtcaaggaagtcacgacgcaggacggcaccaccaccatcgccaacaacctcacctccaccgtccaagtgtttacggacaacgactaccagctaccgtacgtcatcggcaacggaacggaggggtgcctgccggccttccctccgcaggtctttacgctgccgcagtacggctacgcgacactgaaccgtaacaacaccgacgatcccaccgagcggagcagtttcttctgcctggaatactttcccagcaagatgctgcggacgggcaacaactttgaattcacctacagcttcgaggaggtgcccttccactgcagcttcgctcccagccagaacctcttcaagctggccaatccgctggtggaccagtacctgtaccgctttgtgagcaccgacacttccggtaacctacagttccaaaagaacttgaaggccagatatgccaacacttacaagaattggtttccggggcccatgtgccggacccagggctggtacacaagcgcgggcacatataacaacaaaggcgttgccaactttgatacttcaaacaagatggaactggagggggctagttaccaagtaaaccctcaaccaaatggaatgacaaacacgcttcaggatagtaacaaatacgcgcttgaaaacaccatgatcttcaacgcacagaacgcccctccgggaacgacctctctgtaccaggagaacaatcttttgataaccagcgagagcgagacgcagcctgtgaaccgattggcctacaacaccggtggtcaggtatcaaacaacaaccagaattcaaatagtcgaggtgactataactctcttacacatcctacggtcggagtatacaatcaccaggaagtgttgcctggtagcgtgtggatggacagagacgtataccttcagggccccatctgggccaaaatcccggagacaggggcacactttcatccttctccggctatgggcggattcggactcaaacacccaccgcccatgatgctcatcaagaacacaccggtacctagcaacgtcgctgccttctctgacgtgcccgttaaaagcttcatcacccagtacagcaccggacaggtcacggtggagattgaatgggagctcaagaaagaaaactccaagaggtggaatcccgagatacagtacaccaacaactacaacaaccctacattcgtggactttgctccagacacctccggcgagtacaggactacgagggctattggaacccgttaccttacccgacccctgtaa

SEQ ID NO: 198 - DNA, 1800 bp, Artificial Sequence
  LBV54
acggctcctggaaagaagaggcctgtagagcagtctcctcaggaaccggactcctccgcgggtattggcaaatcgggtgcacagcccgctaaaaagagactcaatttcggtcagactggcgacacagagtcagtcccagaccctcaaccaatcggagaacctcccgcagccccctcaggtgtgggatctcttacaatggcttcaggtggtggcgcaccagtggcagacaataacgaaggtgccgatggagtgggtagttcctcgggaaattggcattgcgattcccaatggctgggggacagagtcatcaccaccagcacccgaacctgggccctgcccacctacaacaatcacctctacaagcaaatctccaacagcacatctggaggatcttcaaatgacaacgcctacttcggctacagcaccccctgggggtattttgacttcaacagattccactgccacttctcaccacgtgactggcagcgactcatcaacaacaactggggattccggcctaagcgactcaacttcaagctcttcaacattcaggtcaaagaggttacggacaacaatggagtcaagaccatcgccaataaccttaccagcacggtccaggtcttcacggactcagactatcagctcccgtacgtgctcgggtcggctcacgagggctgcctcccgccgttcccagcggacgttttcatgattcctcagtacgggtatctgacgcttaatgatggaagccaggccgtgggtcgttcgtccttttactgcctggaatatttcccgtcgcaaatgctaagaacgggtaacaacttccagttcagctacgagtttgagaacgtacctttccatagcagctacgctcacagccaaagcctggaccgactaatgaatccactcatcgaccaatacttgtactatctctcaaagactattaacggttctggacagaatcaacaaacgctaaaattcagtgtggccggacccagcaacatggctgtccagggaagaaactacatacctggacccagctaccgacaacaacgtgtctcaaccactgtgactcaaaacaacaacagcgaatttgcttggcctggagcttcttcttgggctctcaatggacgtaatagcttgatgaatcctggacctgctatggccagccacaaagaaggagaggaccgtttctttcctttgtctggatctttaatttttggcaaacaaggaactggaagagacaacgtggatgcggacaaagtcatgataaccaacgaagaagaaattaaaactactaacccggtagcaacggagtcctatggacaagtggccacaaaccaccagagtgcccaagcacaggcgcagaccggctgggttcaaaaccaaggaatacttccgggtatggtttggcaggacagagatgtgtacctgcaaggacccatttgggccaaaattcctcacacggacggcaactttcacccttctccgctgatgggagggtttggaatgaagcacccgcctcctcagatcctcatcaaaaacacacctgtacctgcggatcctccaacggccttcaacaaggacaagctgaactctttcatcacccagtattctactggccaagtcagcgtggagatcgagtgggagctgcagaaggaaaacagcaagcgctggaacccggagatccagtacacttccaactattacaagtctaataatgttgaatttgctgttaatactgaaggtgtatatagtgaaccccgccccattggcaccagatacctgactcgtaatctgtaa

SEQ ID NO: 199 - DNA, 1800 bp, Artificial Sequence; identical to SEQ ID NO: 198
  LBV55

SEQ ID NO: 200 - DNA, 1800 bp, Artificial Sequence; identical to SEQ ID NO: 198
  LBV56

SEQ ID NO: 201 - DNA, 1800 bp, Artificial Sequence; identical to SEQ ID NO: 198
  LBV57

SEQ ID NO: 202 - DNA, 1800 bp, Artificial Sequence; identical to SEQ ID NO: 198
  LBV58

SEQ ID NO: 203 - DNA, 1743 bp, Artificial Sequence
  LBV59
acggctgctaaaggcgagcggatagacgaccactatcccaaaaagaagaaggctcggatcgaagagaccgaagctggaaccagcggagcccagcagctgcagatcccagcccaaccagcctcaagtttgggagctgatacaatgtctgcgggaggtggcagcccactgggcgacaataaccaaggcgccgatggagtgggcaatgcctcgggagattggcattgcgattccacgtggatgggggaccgagtcatcaccaagtccacccgaacctgggtgctgcccagctacaacaaccatcagtaccttgagatccacagcggttccgtcgacggaagcaacgctaacgcttattttggatacagcaccccctgggggtactttgacttcaaccgcttccacagccactggagcccccgagactggcagcgactcgtcaacaactactggggattcagaccccggtccctcaaggtcaagatctttaacatccaagtcaaggaagtcacgacgcaggacggcaccaccaccatcgccaacaacctcacctccaccgtccaagtgtttacggacaacgactaccagctaccgtacgtcatcggcaacggaacggaggggtgcctgccggccttccctccgcaggtctttacgctgccgcagtacggctacgcgacactgaaccgtaacaacaccgacgatcccaccgagcggagcagtttcttctgcctggaatactttcccagcaagatgctgcggacgggcaacaactttgaattcacctacagcttcgaggaggtgcccttccactgcagcttcgctcccagccagaacctcttcaagctggccaatccgctggtggaccagtacctgtaccgctttgtgagcaccgacacttccggtaacctacagttccaaaagaacttgaaggccagatatgccaacacttacaagaattggtttccggggcccatgtgccggacccagggctggtacacaagcgcgggcacatataacaacaaaggcgttgccaactttgatacttcaaacaagatggaactggagggggctagttaccaagtaaaccctcaaccaaatggaatgacaaacacgcttcaggatagtaacaaatacgcgcttgaaaacaccatgatcttcaacgcacagaacgcccctccgggaacgacctctctgtaccaggagaacaatcttttgataaccagcgagagcgagacgcagcctgtgaaccgattggcctacaacaccggtggtcaggtatcaaacaacaaccagaattcaaatacacatcctacggtcggagtatacaatcaccaggaagtgttgcctggtagcgtgtggatggacagagacgtataccttcagggccccatctgggccaaaatcccggagacaggggcacactttcatccttctccggctatgggcggattcggactcaaacacccaccgcccatgatgctcatcaagaacacaccggtacctagcaacgtcgctgccttctctgacgtgcccgttaaaagcttcatcacccagtacagcaccggacaggtcacggtggagattgaatgggagctcaagaaagaaaactccaagaggtggaatcccgagatacagtacaccaacaactacaacaaccctacattcgtggactttgctccagacacctccggcgagtacaggactacgagggctattggaacccgttaccttacccgacccctgtaa

SEQ ID NO: 204 - DNA, 1743 bp, Artificial Sequence; identical to SEQ ID NO: 203
  LBV60

SEQ ID NO: 205 - DNA, 1743 bp, Artificial Sequence; identical to SEQ ID NO: 203
  LBV61

SEQ ID NO: 206 - DNA, 1743 bp, Artificial Sequence; identical to SEQ ID NO: 203
  LBV62

SEQ ID NO: 207 - DNA, 1743 bp, Artificial Sequence; identical to SEQ ID NO: 203
  LBV63

SEQ ID NO: 208 - DNA, 1821 bp, Artificial Sequence
  LBV64
acggctcctggaaagaagaggcctgtagagcagtctcctcaggaaccggactcctccgcgggtattggcaaatcgggtgcacagcccgctaaaaagagactcaatttcggtcagactggcgacacagagtcagtcccagaccctcaaccaatcggagaacctcccgcagccccctcaggtgtgggatctcttacaatggcttcaggtggtggcgcaccagtggcagacaataacgaaggtgccgatggagtgggtagttcctcgggaaattggcattgcgattcccaatggctgggggacagagtcatcaccaccagcacccgaacctgggccctgcccacctacaacaatcacctctacaagcaaatctccaacagcacatctggaggatcttcaaatgacaacgcctacttcggctacagcaccccctgggggtattttgacttcaacagattccactgccacttctcaccacgtgactggcagcgactcatcaacaacaactggggattccggcctaagcgactcaacttcaagctcttcaacattcaggtcaaagaggttacggacaacaatggagtcaagaccatcgccaataaccttaccagcacggtccaggtcttcacggactcagactatcagctcccgtacgtgctcgggtcggctcacgagggctgcctcccgccgttcccagcggacgttttcatgattcctcagtacgggtatctgacgcttaatgatggaagccaggccgtgggtcgttcgtccttttactgcctggaatatttcccgtcgcaaatgctaagaacgggtaacaacttccagttcagctacgagtttgagaacgtacctttccatagcagctacgctcacagccaaagcctggaccgactaatgaatccactcatcgaccaatacttgtactatctctcaaagactattaacggttctggacagaatcaacaaacgctaaaattcagtgtggccggacccagcaacatggctgtccagggaagaaactacatacctggacccagctaccgacaacaacgtgtctcaaccactgtgactcaaaacaacaacagcgaatttgcttggcctggagcttcttcttgggctctcaatggacgtaatagcttgatgaatcctggacctgctatggccagccacaaagaaggagaggaccgtttctttcctttgtctggatctttaatttttggcaaacaaggaactggaagagacaacgtggatgcggacaaagtcatgataaccaacgaagaagaaattaaaactactaacccggtagcaacggagtcctatggacaagtggccacaaaccaccagagtgcccaacgaggtgacctcagcacacctgcacaggcgcagaccggctgggttcaaaaccaaggaatacttccgggtatggtttggcaggacagagatgtgtacctgcaaggacccatttgggccaaaattcctcacacggacggcaactttcacccttctccgctgatgggagggtttggaatgaagcacccgcctcctcagatcctcatcaaaaacacacctgtacctgcggatcctccaacggccttcaacaaggacaagctgaactctttcatcacccagtattctactggccaagtcagcgtggagatcgagtgggagctgcagaaggaaaacagcaagcgctggaacccggagatccagtacacttccaactattacaagtctaataatgttgaatttgctgttaatactgaaggtgtatatagtgaaccccgccccattggcaccagatacctgactcgtaatctgtaa

SEQ ID NO: 209 - DNA, 1821 bp, Artificial Sequence; identical to SEQ ID NO: 208
  LBV65

SEQ ID NO: 210 - DNA, 1821 bp, Artificial Sequence; identical to SEQ ID NO: 208
  LBV66

SEQ ID NO: 211 - DNA, 1821 bp, Artificial Sequence; identical to SEQ ID NO: 208
  LBV67

SEQ ID NO: 212 - DNA, 1821 bp, Artificial Sequence; identical to SEQ ID NO: 208
  LBV68

SEQ ID NO: 213 - DNA, 1779 bp, Artificial Sequence
  LBV69
acggctgctaaaggcgagcggatagacgaccactatcccaaaaagaagaaggctcggatcgaagagaccgaagctggaaccagcggagcccagcagctgcagatcccagcccaaccagcctcaagtttgggagctgatacaatgtctgcgggaggtggcagcccactgggcgacaataaccaaggcgccgatggagtgggcaatgcctcgggagattggcattgcgattccacgtggatgggggaccgagtcatcaccaagtccacccgaacctgggtgctgcccagctacaacaaccatcagtaccttgagatccacagcggttccgtcgacggaagcaacgctaacgcttattttggatacagcaccccctgggggtactttgacttcaaccgcttccacagccactggagcccccgagactggcagcgactcgtcaacaactactggggattcagaccccggtccctcaaggtcaagatctttaacatccaagtcaaggaagtcacgacgcaggacggcaccaccaccatcgccaacaacctcacctccaccgtccaagtgtttacggacaacgactaccagctaccgtacgtcatcggcaacggaacggaggggtgcctgccggccttccctccgcaggtctttacgctgccgcagtacggctacgcgacactgaaccgtaacaacaccgacgatcccaccgagcggagcagtttcttctgcctggaatactttcccagcaagatgctgcggacgggcaacaactttgaattcacctacagcttcgaggaggtgcccttccactgcagcttcgctcccagccagaacctcttcaagctggccaatccgctggtggaccagtacctgtaccgctttgtgagcaccgacacttccggtaacctacagttccaaaagaacttgaaggccagatatgccaacacttacaagaattggtttccggggcccatgtgccggacccagggctggtacacaagcgcgggcacatataacaacaaaggcgttgccaactttgatacttcaaacaagatggaactggagggggctagttaccaagtaaaccctcaaccaaatggaatgacaaacacgcttcaggatagtaacaaatacgcgcttgaaaacaccatgatcttcaacgcacagaacgcccctccgggaacgacctctctgtaccaggagaacaatcttttgataaccagcgagagcgagacgcagcctgtgaaccgattggcctacaacaccggtggtcaggtatcaaacaacaaccagaattcaaatggaagtggtcgaggtgacctcagcacacctggtggaacacatcctacggtcggagtatacaatcaccaggaagtgttgcctggtagcgtgtggatggacagagacgtataccttcagggccccatctgggccaaaatcccggagacaggggcacactttcatccttctccggctatgggcggattcggactcaaacacccaccgcccatgatgctcatcaagaacacaccggtacctagcaacgtcgctgccttctctgacgtgcccgttaaaagcttcatcacccagtacagcaccggacaggtcacggtggagattgaatgggagctcaagaaagaaaactccaagaggtggaatcccgagatacagtacaccaacaactacaacaaccctacattcgtggactttgctccagacacctccggcgagtacaggactacgagggctattggaacccgttaccttacccgacccctgtaa

SEQ ID NO: 214 - DNA, 1779 bp, Artificial Sequence; identical to SEQ ID NO: 213
  LBV70

SEQ ID NO: 215 - DNA, 1779 bp, Artificial Sequence; identical to SEQ ID NO: 213
  LBV71

SEQ ID NO: 216 - DNA, 1779 bp, Artificial Sequence; identical to SEQ ID NO: 213
  LBV72

SEQ ID NO: 217 - DNA, 1779 bp, Artificial Sequence; identical to SEQ ID NO: 213
  LBV73

SEQ ID NO: 218 - DNA, 1779 bp, Artificial Sequence; identical to SEQ ID NO: 213
  LBV76

SEQ ID NO: 219 - DNA, 1800 bp, Artificial Sequence
  LBV91
acggctcctggaaagaagaggcctgtagagcagtctcctcaggaaccggactcctccgcgggtattggcaaatcgggtgcacagcccgctaaaaagagactcaatttcggtcagactggcgacacagagtcagtcccagaccctcaaccaatcggagaacctcccgcagccccctcaggtgtgggatctcttacaatggcttcaggtggtggcgcaccagtggcagacaataacgaaggtgccgatggagtgggtagttcctcgggaaattggcattgcgattcccaatggctgggggacagagtcatcaccaccagcacccgaacctgggccctgcccacctacaacaatcacctctacaagcaaatctccaacagcacatctggaggatcttcaaatgacaacgcctacttcggctacagcaccccctgggggtattttgacttcaacagattccactgccacttctcaccacgtgactggcagcgactcatcaacaacaactggggattccggcctaagcgactcaacttcaagctcttcaacattcaggtcaaagaggttacggacaacaatggagtcaagaccatcgccaataaccttaccagcacggtccaggtcttcacggactcagactatcagctcccgtacgtgctcgggtcggctcacgagggctgcctcccgccgttcccagcggacgttttcatgattcctcagtacgggtatctgacgcttaatgatggaagccaggccgtgggtcgttcgtccttttactgcctggaatatttcccgtcgcaaatgctaagaacgggtaacaacttccagttcagctacgagtttgagaacgtacctttccatagcagctacgctcacagccaaagcctggaccgactaatgaatccactcatcgaccaatacttgtactatctctcaaagactattaacggttctggacagaatcaacaaacgctaaaattcagtgtggccggacccagcaacatggctgtccagggaagaaactacatacctggacccagctaccgacaacaacgtgtctcaaccactgtgactcaaaacaacaacagcgaaattgcttggcctcgagcttcttcttgggctctcaatggacgtaatagcttgatgaatcctggacctgctatggccagccacaaagaaggagaggaccgtttctttcctttgtctggatctttaatttttggcaaacaaggaactggaagagacaacgtggatgcggacaaagtcatgataaccaacgaagaagaaattaaaactactaacccggtagcaacggagtcctatggacaagtggccacaaaccaccagagtgcccaagcacaggcgcagaccggctgggttcaaaaccaaggaatacttccgggtatggtttggcaggacagagatgtgtacctgcaaggacccatttgggccaaaattcctcacacggacggcaactttcacccttctccgctgatgggagggtttggaatgaagcacccgcctcctcagatcctcatcaaaaacacacctgtacctgcggatcctccaacggccttcaacaaggacaagctgaactctttcatcacccagtattctactggccaagtcagcgtggagatcgagtgggagctgcagaaggaaaacagcaagcgctggaacccggagatccagtacacttccaactattgcaagtctaataatgttgaatttgctgttaatactgaaggtgtatatagtgaaccccgccccattggcaccagatacctgactcgtaatctgtaa

SEQ ID NO: 220 - DNA, 1839 bp, Artificial Sequence
  LBV92
acggctcctggaaagaagagaccggtagagccatcaccccagcgttctccagactcctctacgggcatcggcaagaaaggccagcagcccgcgaaaaagagactcaactttgggcagactggcgactcagagtcagtgcccgaccctcaaccaatcggagaaccccccgcaggcccctctggtctgggatctggtacaatggctgcaggcggtggcgctccaatggcagacaataacgaaggcgccgacggagtgggtagttcctcaggaaattggcattgcgattccacatggctgggcgacagagtcatcaccaccagcacccgaacctgggccctccccacctacaacaaccacctctacaagcaaatctccaacgggacttcgggaggaagcaccaacgacaacacctacttcggctacagcaccccctgggggtattttgactttaacagattccactgccacttctcaccacgtgactggcagcgactcatcaacaacaactggggattccggcccaagagactcaacttcaagctcttcaacatccaggtcaaggaggtcacgcagaatgaaggcaccaagaccatcgccaataaccttaccagcacgattcaggtctttacggactcggaataccagctcccgtacgtcctcggctctgcgcaccagggctgcctgcctccgttcccggcggacgtcttcatgattcctcagtacgggtacctgactctgaacaatggcagtcaggccgtgggccgttcctccttctactgcctggagtactttccttctcaaatgctgagaacgggcaacaactttgagttcagctacaactttgaggacgtgccttttcacagcagctacgcgcacagccaaagcctggaccggctgatgaaccccctcatcgaccagtacctgtactacctgtctcggactcagtccacgggaggtaccgcaggaactcagcagttgctattttctcaggccgggcctaataacatgtcggctcaggccaaaaactggctacccgggccctgctaccggcagcaacgcgtctccacgacactgtcgcaaaataacaacagcaacattgcctggacccgtgccaccaagtatcatctgaatggcagagactctctggtaaatcccggtgtcgctatggcaacccacaaggacgacgaagagcgattttttccgtccagcggagtcttaatgtttgggaaacagggagctggaaaagacaacgtggactatagcagcgttatgctaaccagtgaggaagaaattaaaaccaccaacccagtggccacagaacagtacggcgtggtggccgataacctgcaacagcaaggaagtggtcgaggtgacctcggtctttctggtggagccgctcctattgtaggggccgtcaacagtcaaggagccttacctggcatggtctggcagaaccgggacgtgtacctgcagggtcctatctgggccaagattcctcacacggacggaaactttcatccctcgccgctgatgggaggctttggactgaaacacccgcctcctcagatcctgattaagaatacacctgttcccgcggatcctccaactaccttcaaccaagctaagctggcgtcgttcatcacgcagtacagcaccggacaggtcagcgtggaaattgaatgggagctgcagaaagaaaacagcaaacgctggaacccagagattcaatacacttccaactactgtaaatctacaaatgtggactttgctgttaacacagagggcacttattctgagcctcgccccatcggcacccgttacctcacccgtaatctgtaa

SEQ ID NO: 221 - DNA, 1824 bp, Artificial Sequence
  LBV93
acggctcctggaaagaagagaccggtagagccatcaccccagcgttctccagactcctctacgggcatcggcaagaaaggccagcagcccgcgaaaaagagactcaactttgggcagactggcgactcagagtcagtgcccgaccctcaaccaatcggagaaccccccgcaggcccctctggtctgggatctggtacaatggctgcaggcggtggcgctccaatggcagacaataacgaaggcgccgacggagtgggtagttcctcaggaaattggcattgcgattccacatggctgggcgacagagtcatcaccaccagcacccgaacctgggccctccccacctacaacaaccacctctacaagcaaatctccaacgggacttcgggaggaagcaccaacgacaacacctacttcggctacagcaccccctgggggtattttgactttaacagattccactgccacttctcaccacgtgactggcagcgactcatcaacaacaactggggattccggcccaagagactcaacttcaagctcttcaacatccaggtcaaggaggtcacgcagaatgaaggcaccaagaccatcgccaataaccttaccagcacgattcaggtctttacggactcggaataccagctcccgtacgtcctcggctctgcgcaccagggctgcctgcctccgttcccggcggacgtcttcatgattcctcagtacgggtacctgactctgaacaatggcagtcaggccgtgggccgttcctccttctactgcctggagtactttccttctcaaatgctgagaacgggcaacaactttgagttcagctacaactttgaggacgtgccttttcacagcagctacgcgcacagccaaagcctggaccggctgatgaaccccctcatcgaccagtacctgtactacctgtctcggactcagtccacgggaggtaccgcaggaactcagcagttgctattttctcaggccgggcctaataacatgtcggctcaggccaaaaactggctacccgggccctgctaccggcagcaacgcgtctccacgacactgtcgcaaaataacaacagcaacattgcctggacccgtgccaccaagtatcatctgaatggcagagactctctggtaaatcccggtgtcgctatggcaacccacaaggacgacgaagagcgattttttccgtccagcggagtcttaatgtttgggaaacagggagctggaaaagacaacgtggactatagcagcgttatgctaaccagtgaggaagaaattaaaaccaccaacccagtggccacagaacagtacggcgtggtggccgataacctgcaacagcaacgaggtgactacgtcggacttgccgctcctattgtaggggccgtcaacagtcaaggagccttacctggcatggtctggcagaaccgggacgtgtacctgcagggtcctatctgggccaagattcctcacacggacggaaactttcatccctcgccgctgatgggaggctttggactgaaacacccgcctcctcagatcctgattaagaatacacctgttcccgcggatcctccaactaccttcaaccaagctaagctggcgtcgttcatcacgcagtacagcaccggacaggtcagcgtggaaattgaatgggagctgcagaaagaaaacagcaaacgctggaacccagagattcaatacacttccaactactgtaaatctacaaatgtggactttgctgttaacacagagggcacttattctgagcctcgccccatcggcacccgttacctcacccgtaatctgtaa

SEQ ID NO: 222 - DNA, 1824 bp, Artificial Sequence; identical to SEQ ID NO: 221
  LBV94

SEQ ID NO: 223 - DNA, 1824 bp, Artificial Sequence; identical to SEQ ID NO: 221
  LBV95

SEQ ID NO: 224 - DNA, 1800 bp, Artificial Sequence; identical to SEQ ID NO: 219
  LBV96

SEQ ID NO: 225 - DNA, 1821 bp, Artificial Sequence
  LBV97
acggctcctggaaagaagaggcctgtagagcagtctcctcaggaaccggactcctccgcgggtattggcaaatcgggtgcacagcccgctaaaaagagactcaatttcggtcagactggcgacacagagtcagtcccagaccctcaaccaatcggagaacctcccgcagccccctcaggtgtgggatctcttacaatggcttcaggtggtggcgcaccagtggcagacaataacgaaggtgccgatggagtgggtagttcctcgggaaattggcattgcgattcccaatggctgggggacagagtcatcaccaccagcacccgaacctgggccctgcccacctacaacaatcacctctacaagcaaatctccaacagcacatctggaggatcttcaaatgacaacgcctacttcggctacagcaccccctgggggtattttgacttcaacagattccactgccacttctcaccacgtgactggcagcgactcatcaacaacaactggggattccggcctaagcgactcaacttcaagctcttcaacattcaggtcaaagaggttacggacaacaatggagtcaagaccatcgccaataaccttaccagcacggtccaggtcttcacggactcagactatcagctcccgtacgtgctcgggtcggctcacgagggctgcctcccgccgttcccagcggacgttttcatgattcctcagtacgggtatctgacgcttaatgatggaagccaggccgtgggtcgttcgtccttttactgcctggaatatttcccgtcgcaaatgctaagaacgggtaacaacttccagttcagctacgagtttgagaacgtacctttccatagcagctacgctcacagccaaagcctggaccgactaatgaatccactcatcgaccaatacttgtactatctctcaaagactattaacggttctggacagaatcaacaaacgctaaaattcagtgtggccggacccagcaacatggctgtccagggaagaaactacatacctggacccagctaccgacaacaacgtgtctcaaccactgtgactcaaaacaacaacagcgaaattgcttggcctcgagcttcttcttgggctctcaatggacgtaatagcttgatgaatcctggacctgctatggccagccacaaagaaggagaggaccgtttctttcctttgtctggatctttaatttttggcaaacaaggaactggaagagacaacgtggatgcggacaaagtcatgataaccaacgaagaagaaattaaaactactaacccggtagcaacggagtcctatggacaagtggccacaaaccaccagagtgcccaacgaggtgactacgtcggacttgcacaggcgcagaccggctgggttcaaaaccaaggaatacttccgggtatggtttggcaggacagagatgtgtacctgcaaggacccatttgggccaaaattcctcacacggacggcaactttcacccttctccgctgatgggagggtttggaatgaagcacccgcctcctcagatcctcatcaaaaacacacctgtacctgcggatcctccaacggccttcaacaaggacaagctgaactctttcatcacccagtattctactggccaagtcagcgtggagatcgagtgggagctgcagaaggaaaacagcaagcgctggaacccggagatccagtacacttccaactattgcaagtctaataatgttgaatttgctgttaatactgaaggtgtatatagtgaaccccgccccattggcaccagatacctgactcgtaatctgtaa

SEQ ID NO: 226 - DNA, 1821 bp, Artificial Sequence
  LBV98
acggctcctggaaagaagaggcctgtagagcagtctcctcaggaaccggactcctccgcgggtattggcaaatcgggtgcacagcccgctaaaaagagactcaatttcggtcagactggcgacacagagtcagtcccagaccctcaaccaatcggagaacctcccgcagccccctcaggtgtgggatctcttacaatggcttcaggtggtggcgcaccagtggcagacaataacgaaggtgccgatggagtgggtagttcctcgggaaattggcattgcgattcccaatggctgggggacagagtcatcaccaccagcacccgaacctgggccctgcccacctacaacaatcacctctacaagcaaatctccaacagcacatctggaggatcttcaaatgacaacgcctacttcggctacagcaccccctgggggtattttgacttcaacagattccactgccacttctcaccacgtgactggcagcgactcatcaacaacaactggggattccggcctaagcgactcaacttcaagctcttcaacattcaggtcaaagaggttacggacaacaatggagtcaagaccatcgccaataaccttaccagcacggtccaggtcttcacggactcagactatcagctcccgtacgtgctcgggtcggctcacgagggctgcctcccgccgttcccagcggacgttttcatgattcctcagtacgggtatctgacgcttaatgatggaagccaggccgtgggtcgttcgtccttttactgcctggaatatttcccgtcgcaaatgctaagaacgggtaacaacttccagttcagctacgagtttgagaacgtacctttccatagcagctacgctcacagccaaagcctggaccgactaatgaatccactcatcgaccaatacttgtactatctctcaaagactattaacggttctggacagaatcaacaaacgctaaaattcagtgtggccggacccagcaacatggctgtccagggaagaaactacatacctggacccagctaccgacaacaacgtgtctcaaccactgtgactcaaaacaacaacagcgaatttgcttggcctggagcttcttcttgggctctcaatggacgtaatagcttgatgaatcctggacctgctatggccagccacaaagaaggagaggaccgtttctttcctttgtctggatctttaatttttggcaaacaaggaactggaagagacaacgtggatgcggacaaagtcatgataaccaacgaagaagaaattaaaactactaacccggtagcaacggagtcctatggacaagtggccacaaaccaccagagtgcccaacgaggtgactacgtcggacttgcacaggcgcagaccggctgggttcaaaaccaaggaatacttccgggtatggtttggcaggacagagatgtgtacctgcaaggacccatttgggccaaaattcctcacacggacggcaactttcacccttctccgctgatgggagggtttggaatgaagcacccgcctcctcagatcctcatcaaaaacacacctgtacctgcggatcctccaacggccttcaacaaggacaagctgaactctttcatcacccagtattctactggccaagtcagcgtggagatcgagtgggagctgcagaaggaaaacagcaagcgctggaacccggagatccagtacacttccaactattacaagtctaataatgttgaatttgctgttaatactgaaggtgtatatagtgaaccccgccccattggcaccagatacctgactcgtaatctgtaa

SEQ ID NO: 227 - DNA, 1803 bp, Artificial Sequence
  LBV99
acggctcctggaaagaagagaccggtagagccatcaccccagcgttctccagactcctctacgggcatcggcaagaaaggccagcagcccgcgaaaaagagactcaactttgggcagactggcgactcagagtcagtgcccgaccctcaaccaatcggagaaccccccgcaggcccctctggtctgggatctggtacaatggctgcaggcggtggcgctccaatggcagacaataacgaaggcgccgacggagtgggtagttcctcaggaaattggcattgcgattccacatggctgggcgacagagtcatcaccaccagcacccgaacctgggccctccccacctacaacaaccacctctacaagcaaatctccaacgggacttcgggaggaagcaccaacgacaacacctacttcggctacagcaccccctgggggtattttgactttaacagattccactgccacttctcaccacgtgactggcagcgactcatcaacaacaactggggattccggcccaagagactcaacttcaagctcttcaacatccaggtcaaggaggtcacgcagaatgaaggcaccaagaccatcgccaataaccttaccagcacgattcaggtctttacggactcggaataccagctcccgtacgtcctcggctctgcgcaccagggctgcctgcctccgttcccggcggacgtcttcatgattcctcagtacgggtacctgactctgaacaatggcagtcaggccgtgggccgttcctccttctactgcctggagtactttccttctcaaatgctgagaacgggcaacaactttgagttcagctacaactttgaggacgtgccttttcacagcagctacgcgcacagccaaagcctggaccggctgatgaaccccctcatcgaccagtacctgtactacctgtctcggactcagtccacgggaggtaccgcaggaactcagcagttgctattttctcaggccgggcctaataacatgtcggctcaggccaaaaactggctacccgggccctgctaccggcagcaacgcgtctccacgacactgtcgcaaaataacaacagcaacattgcctggacccgtgccaccaagtatcatctgaatggcagagactctctggtaaatcccggtgtcgctatggcaacccacaaggacgacgaagagcgattttttccgtccagcggagtcttaatgtttgggaaacagggagctggaaaagacaacgtggactatagcagcgttatgctaaccagtgaggaagaaattaaaaccaccaacccagtggccacagaacagtacggcgtggtggccgataacctgcaacagcaagccgctcctattgtaggggccgtcaacagtcaaggagccttacctggcatggtctggcagaaccgggacgtgtacctgcagggtcctatctgggccaagattcctcacacggacggaaactttcatccctcgccgctgatgggaggctttggactgaaacacccgcctcctcagatcctgattaagaatacacctgttcccgcggatcctccaactaccttcaaccaagctaagctggcgtcgttcatcacgcagtacagcaccggacaggtcagcgtggaaattgaatgggagctgcagaaagaaaacagcaaacgctggaacccagagattcaatacacttccaactactgtaaatctacaaatgtggactttgctgttaacacagagggcacttattctgagcctcgccccatcggcacccgttacctcacccgtaatctgtaa

SEQ ID NO: 228 - DNA, 1824 bp, Artificial Sequence; identical to SEQ ID NO: 221
  LBV100

SEQ ID NO: 229 - DNA, 2232 bp, Artificial Sequence
  LBV101
atggctgccgatggttatcttccagattggctcgaggacaaccttagtgaaggaattcgcgagtggtgggctttgaaacctggagcccctcaacccaaggcaaatcaacaacatcaagacaacgctcgaggtcttgtgcttccgggttacaaataccttggacccggcaacggactcgacaagggggagccggtcaacgcagcagacgcggcggccctcgagcacgacaaggcctacgaccagcagctcaaggccggagacaacccgtacctcaagtacaaccacgccgacgccgagttccaggagcggctcaaagaagatacgtcttttgggggcaacctcgggcgagcagtcttccaggccaaaaagaggcttcttgaacctcttggtctggttgaggaagcggctaagacggctcctggaaagaagaggcctgtagagcagtctcctcaggaaccggactcctccgcgggtattggcaaatcgggtgcacagcccgctaaaaagagactcaatttcggtcagactggcgacacagagtcagtcccagaccctcaaccaatcggagaacctcccgcagccccctcaggtgtgggatctcttacaatggcttcaggtggtggcgcaccagtggcagacaataacgaaggtgccgatggagtgggtagttcctcgggaaattggcattgcgattcccaatggctgggggacagagtcatcaccaccagcacccgaacctgggccctgcccacctacaacaatcacctctacaagcaaatctccaacagcacatctggaggatcttcaaatgacaacgcctacttcggctacagcaccccctgggggtattttgacttcaacagattccactgccacttctcaccacgtgactggcagcgactcatcaacaacaactggggattccggcctaagcgactcaacttcaagctcttcaacattcaggtcaaagaggttacggacaacaatggagtcaagaccatcgccaataaccttaccagcacggtccaggtcttcacggactcagactatcagctcccgtacgtgctcgggtcggctcacgagggctgcctcccgccgttcccagcggacgttttcatgattcctcagtacgggtatctgacgcttaatgatggaagccaggccgtgggtcgttcgtccttttactgcctggaatatttcccgtcgcaaatgctaagaacgggtaacaacttccagttcagctacgagtttgagaacgtacctttccatagcagctacgctcacagccaaagcctggaccgactaatgaatccactcatcgaccaatacttgtactatctctcaaagactattgacggtgctgccacgaaaaatcaaacgctaaaattcagtgtggccggacccagcaacatggctgtccagggaagaaactacatacctggacccagctaccgacaacaacgtgtctcaaccactgtgactcaaaacaacaacagcgaatttgcttggcctggagcttcttcttgggctctcaatggacgtaatagcttgatgaatcctggacctgctatggccagccacaaagaaggagaggaccgtttctttcctttgtctggatctttaatttttggcaaacaaggaactggaagagacaacgtggatgcggacaaagtcatgataaccaacgaagaagaaattaaaactactaacccggtagcaacggagtcctatggacaagtggccacaaaccaccagagtgcccaacgaggtgactacgtcggacttgcacaggcgcagaccggctgggttcaaaaccaaggaatacttccgggtatggtttggcaggacagagatgtgtacctgcaaggacccatttgggccaaaattcctcacacggacggcaactttcacccttctccgctgatgggagggtttggaatgaagcacccgcctcctcagatcctcatcaaaaacacacctgtacctgcggatcctccaacggccttcaacaaggacaagctgaactctttcatcacccagtattctactggccaagtcagcgtggagatcgagtgggagctgcagaaggaaaacagcaagcgctggaacccggagatccagtacacttccaactattacaagtctaataatgttgaatttgctgttaatactgaaggtgtatatagtgaaccccgccccattggcaccagatacctgactcgtaatctgtaa

SEQ ID NO: 230 - DNA, 2232 bp, Artificial Sequence
  LBV102
atggctgccgatggttatcttccagattggctcgaggacaaccttagtgaaggaattcgcgagtggtgggctttgaaacctggagcccctcaacccaaggcaaatcaacaacatcaagacaacgctcgaggtcttgtgcttccgggttacaaataccttggacccggcaacggactcgacaagggggagccggtcaacgcagcagacgcggcggccctcgagcacgacaaggcctacgaccagcagctcaaggccggagacaacccgtacctcaagtacaaccacgccgacgccgagttccaggagcggctcaaagaagatacgtcttttgggggcaacctcgggcgagcagtcttccaggccaaaaagaggcttcttgaacctcttggtctggttgaggaagcggctaagacggctcctggaaagaagaggcctgtagagcagtctcctcaggaaccggactcctccgcgggtattggcaaatcgggtgcacagcccgctaaaaagagactcaatttcggtcagactggcgacacagagtcagtcccagaccctcaaccaatcggagaacctcccgcagccccctcaggtgtgggatctcttacaatggcttcaggtggtggcgcaccagtggcagacaataacgaaggtgccgatggagtgggtagttcctcgggaaattggcattgcgattcccaatggctgggggacagagtcatcaccaccagcacccgaacctgggccctgcccacctacaacaatcacctctacaagcaaatctccaacagcacatctggaggatcttcaaatgacaacgcctacttcggctacagcaccccctgggggtattttgacttcaacagattccactgccacttctcaccacgtgactggcagcgactcatcaacaacaactggggattccggcctaagcgactcaacttcaagctcttcaacattcaggtcaaagaggttacggacaacaatggagtcaagaccatcgccaataaccttaccagcacggtccaggtcttcacggactcagactatcagctcccgtacgtgctcgggtcggctcacgagggctgcctcccgccgttcccagcggacgttttcatgattcctcagtacgggtatctgacgcttaatgatggaagccaggccgtgggtcgttcgtccttttactgcctggaatatttcccgtcgcaaatgctaagaacgggtaacaacttccagttcagctacgagtttgagaacgtacctttccatagcagctacgctcacagccaaagcctggaccgactaatgaatccactcatcgaccaatacttgtactatctctcaaagactattacgactggcggacacagctcacaaacgctaaaattcagtgtggccggacccagcaacatggctgtccagggaagaaactacatacctggacccagctaccgacaacaacgtgtctcaaccactgtgactcaaaacaacaacagcgaatttgcttggcctggagcttcttcttgggctctcaatggacgtaatagcttgatgaatcctggacctgctatggccagccacaaagaaggagaggaccgtttctttcctttgtctggatctttaatttttggcaaacaaggaactggaagagacaacgtggatgcggacaaagtcatgataaccaacgaagaagaaattaaaactactaacccggtagcaacggagtcctatggacaagtggccacaaaccaccagagtgcccaacgaggtgactacgtcggacttgcacaggcgcagaccggctgggttcaaaaccaaggaatacttccgggtatggtttggcaggacagagatgtgtacctgcaaggacccatttgggccaaaattcctcacacggacggcaactttcacccttctccgctgatgggagggtttggaatgaagcacccgcctcctcagatcctcatcaaaaacacacctgtacctgcggatcctccaacggccttcaacaaggacaagctgaactctttcatcacccagtattctactggccaagtcagcgtggagatcgagtgggagctgcagaaggaaaacagcaagcgctggaacccggagatccagtacacttccaactattacaagtctaataatgttgaatttgctgttaatactgaaggtgtatatagtgaaccccgccccattggcaccagatacctgactcgtaatctgtaa

SEQ ID NO: 231 - protein, 747 aa, Artificial Sequence
  AAVDJ 7m8 (AA)
MAADGYLPDWLEDTLSEGIRQWWKLKPGPPPPKPAERHKDDSRGLVLPGYKYLGPFNGLDKGEPVNEADAAALEHDKAYDRQLDSGDNPYLKYNHADAEFQERLKEDTSFGGNLGRAVFQAKKRLLEPLGLVEEAAKTAPGKKRPVEHSPVEPDSSSGTGKAGQQPARKRLNFGQTGDADSVPDPQPIGEPPAAPSGVGSLTMAAGGGAPMADNNEGADGVGNSSGNWHCDSTWMGDRVITTSTRTWALPTYNNHLYKQISNSTSGGSSNDNAYFGYSTPWGYFDFNRFHCHFSPRDWQRLINNNWGFRPKRLSFKLFNIQVKEVTQNEGTKTIANNLTSTIQVFTDSEYQLPYVLGSAHQGCLPPFPADVFMIPQYGYLTLNNGSQAVGRSSFYCLEYFPSQMLRTGNNFQFTYTFEDVPFHSSYAHSQSLDRLMNPLIDQYLYYLSRTQTTGGTTNTQTLGFSQGGPNTMANQAKNWLPGPCYRQQRVSKTSADNNNSEYSWTGATKYHLNGRDSLVNPGPAMASHKDDEEKFFPQSGVLIFGKQGSEKTNVDIEKVMITDEEEIRTTNPVATEQYGSVSTNLQRGNLALGETTRPARQAATADVNTQGVLPGMVWQDRDVYLQGPIWAKIPHTDGHFHPSPLMGGFGLKHPPPQILIKNTPVPADPPTTFNQSKLNSFITQYSTGQVSVEIEWELQKENSKRWNPEIQYTSNYYKSTSVDFAVNTEGVYSEPRPIGTRYLTRNL

SEQ ID NO: 232 - DNA, 2244 bp, Artificial Sequence
  AAVDJ 7m8 (AA)
atggctgccgatggttatcttccagattggctcgaggacactctctctgaaggaataagacagtggtggaagctcaaacctggcccaccaccaccaaagcccgcagagcggcataaggacgacagcaggggtcttgtgcttcctgggtacaagtacctcggacccttcaacggactcgacaagggagagccggtcaacgaggcagacgccgcggccctcgagcacgacaaagcctacgaccggcagctcgacagcggagacaacccgtacctcaagtacaaccacgccgacgccgagttccaggagcggctcaaagaagatacgtcttttgggggcaacctcgggcgagcagtcttccaggccaaaaagaggcttcttgaacctcttggtctggttgaggaagcggctaagacggctcctggaaagaagaggcctgtagagcactctcctgtggagccagactcctcctcgggaaccggaaaggcgggccagcagcctgcaagaaaaagattgaattttggtcagactggagacgcagactcagtcccagaccctcaaccaatcggagaacctcccgcagccccctcaggtgtgggatctcttacaatggctgcaggcggtggcgcaccaatggcagacaataacgagggcgccgacggagtgggtaattcctcgggaaattggcattgcgattccacatggatgggcgacagagtcatcaccaccagcacccgaacctgggccctgcccacctacaacaaccacctctacaagcaaatctccaacagcacatctggaggatcttcaaatgacaacgcctacttcggctacagcaccccctgggggtattttgactttaacagattccactgccacttttcaccacgtgactggcagcgactcatcaacaacaactggggattccggcccaagagactcagcttcaagctcttcaacatccaggtcaaggaggtcacgcagaatgaaggcaccaagaccatcgccaataacctcaccagcaccatccaggtgtttacggactcggagtaccagctgccgtacgttctcggctctgcccaccagggctgcctgcctccgttcccggcggacgtgttcatgattccccagtacggctacctaacactcaacaacggtagtcaggccgtgggacgctcctccttctactgcctggaatactttccttcgcagatgctgagaaccggcaacaacttccagtttacttacaccttcgaggacgtgcctttccacagcagctacgcccacagccagagcttggaccggctgatgaatcctctgattgaccagtacctgtactacttgtctcggactcaaacaacaggaggcacgacaaatacgcagactctgggcttcagccaaggtgggcctaatacaatggccaatcaggcaaagaactggctgccaggaccctgttaccgccagcagcgagtatcaaagacatctgcggataacaacaacagtgaatactcgtggactggagctaccaagtaccacctcaatggcagagactctctggtgaatccgggcccggccatggcaagccacaaggacgatgaagaaaagttttttcctcagagcggggttctcatctttgggaagcaaggctcagagaaaacaaatgtggacattgaaaaggtcatgattacagacgaagaggaaatcaggacaaccaatcccgtggctacggagcagtatggttctgtatctaccaacctccagagaggcaacctagcactcggcgaaacaacaagacctgctagacaagcagctaccgcagatgtcaacacacaaggcgttcttccaggcatggtctggcaggacagagatgtgtaccttcaggggcccatctgggcaaagattccacacacggacggacattttcacccctctcccctcatgggtggattcggacttaaacaccctccgcctcagatcctgatcaagaacacgcctgtacctgcggatcctccgaccaccttcaaccagtcaaagctgaactctttcatcacccagtattctactggccaagtcagcgtggagatcgagtgggagctgcagaaggaaaacagcaagcgctggaaccccgagatccagtacacctccaactactacaaatctacaagtgtggactttgctgttaatacagaaggcgtgtactctgaaccccgccccattggcacccgttacctcacccgtaatctgtaa

SEQ ID NO: 233 - protein, 803 aa, Artificial Sequence; identical to SEQ ID NO: 15
  LBV28

SEQ ID NO: 234 - protein, 868 aa, Artificial Sequence
  LBV40
MAADGYLPDWLEDNLSEGIREWWDLKPGAPKPKANQQKQDNGRGLVLPGYKYLGPFNGLDKGEPVNAADAAALEHDKAYDQQLQAGDNPYLRYNHADAEFQERLQEDTSFGGNLGRAVFQAKKRVLEPLGLVESPVKTAPGKKRPVEPSPQRSPDSSTGIGKKGQQPAKKRLNFGQTGDSESVPDPQPIGEPPAGPSGLGSGTMAAGGGAPMADNNEGADGVGSSSGNWHCDSTWLGDRVITTSTRTWALPTYNNHLYKQISNGTSGGSTNDNTYFGYSTPWGYFDFNRFHCHFSPRDWQRLINNNWGFRPKRLNFKLFNIQVKEVTQNEGTKTIANNLTSTIQVFTDSEYQLPYVLGSAHQGCLPPFPADVFMIPQYGYLTLNNGSQAVGRSSFYCLEYFPSQMLRTGNNFEFSYNFEDVPFHSSYAHSQSLDRLMNPLIDQYLYYLSRTQSTGGTAGTQQLLFSQAGPNNMSAQAKNWLPGPCYRQQRVSTTLSQNNNSNFAWTGATKYHLNGRDSLVNPGVAMATHKDDEERFFPSSGVLMFGKQGAGKDNVDYSSVMLTSEEEIKTTNPVATEQYGVVADNLQQQGGGGSGGGGSGGGGSGGGGSGGGGSSSDSPRNLEVTNATPNSLTISWDYPRYNALYYRITYGETGGNSPSQEFTVPRYYSYATISGLFPGQDYTITVYAVSRYNHYSNPISINYRTEIDKPSQGSGGGGANAAPIVGAVNSQGALPGMVWQNRDVYLQGPIWAKIPHTDGNFHPSPLMGGFGLKHPPPQILIKNTPVPADPPTTFNQAKLASFITQYSTGQVSVEIEWELQKENSKRWNPEIQYTSNYYKSTNVDFAVNTEGTYSEPRPIGTRYLTRNL

SEQ ID NO: 235 - protein, 747 aa, Artificial Sequence; identical to SEQ ID NO: 231
  LBV77

SEQ ID NO: 236 - protein, 601 aa, Artificial Sequence; identical to SEQ ID NO: 84
  LBV28

SEQ ID NO: 237 - protein, 601 aa, Artificial Sequence; identical to SEQ ID NO: 84
  LBV40

SEQ ID NO: 238 - DNA, 2412 bp, Artificial Sequence
  LBV28
atggctgccgatggttatcttccggattggctcgaggacaacctctctgagggcattcgcgagtggtgggacttgaaacctggagccccgaaacccaaagccaaccagcaaaagcaggacaacggccggggtctggtgcttcctggctacaagtacctcggacccttcaacggactcgacaagggggagcccgtcaacgcggcggacgcagcggccctcgagcacgacaaggcctacgaccagcagctccaagcgggtgacaatccgtacctgcggtataaccacgccgacgccgagtttcaggagcgtctgcaagaagatacgtcttttgggggcaacctcgggcgagcagtcttccaggccaagaagcgggttctcgaacctctcggtctggttgagtctcctgtgaagacggctcctggaaagaagagaccggtagagccatcaccccagcgttctccagactcctctacgggcatcggcaagaaaggccagcagcccgcgaaaaagagactcaactttgggcagactggcgactcagagtcagtgcccgaccctcaaccaatcggagaaccccccgcaggcccctctggtctgggatctggtacaatggctgcaggcggtggcgctccaatggcagacaataacgaaggcgccgacggagtgggtagttcctcaggaaattggcattgcgattccacatggctgggcgacagagtcatcaccaccagcacccgaacctgggccctccccacctacaacaaccacctctacaagcaaatctccaacgggacttcgggaggaagcaccaacgacaacacctacttcggctacagcaccccctgggggtattttgactttaacagattccactgccacttctcaccacgtgactggcagcgactcatcaacaacaactggggattccggcccaagagactcaacttcaagctcttcaacatccaggtcaaggaggtcacgcagaatgaaggcaccaagaccatcgccaataaccttaccagcacgattcaggtctttacggactcggaataccagctcccgtacgtcctcggctctgcgcaccagggctgcctgcctccgttcccggcggacgtcttcatgattcctcagtacgggtacctgactctgaacaatggcagtcaggccgtgggccgttcctccttctactgcctggagtactttccttctcaaatgctgagaacgggcaacaactttgagttcagctacaactttgaggacgtgccttttcacagcagctacgcgcacagccaaagcctggaccggctgatgaaccccctcatcgaccagtacctgtactacctgtctcggactcagtccacgggaggtaccgcaggaactcagcagttgctattttctcaggccgggcctaataacatgtcggctcaggccaaaaactggctacccgggccctgctaccggcagcaacgcgtctccacgacactgtcgcaaaataacaacagcaactttgcctggaccggtgccaccaagtatcatctgaatggcagagactctctggtaaatcccggtgtcgctatggcaacccacaaggacgacgaagagcgattttttccgtccagcggagtcttaatgtttgggaaacagggagctggaaaagacaacgtggactatagcagcgttatgctaaccagtgaggaagaaattaaaaccaccaacccagtggccacagaacagtacggcgtggtggccgataacctgcaacagcaaggtgggggcggttccggaggcggagggagtgggggaggcggttccggcggtggaggttctggtggtggaggtagcagtcttgaggaggaatgggcgcaggtagaatgtgaagtgtatggccgaggatgtccctctggatcacttgacgagtcattttatgattggttcgagagacaactcggagggggtggtgcaaacgccgctcctattgtaggggccgtcaacagtcaaggagccttacctggcatggtctggcagaaccgggacgtgtacctgcagggtcctatctgggccaagattcctcacacggacggaaactttcatccctcgccgctgatgggaggctttggactgaaacacccgcctcctcagatcctgattaagaatacacctgttcccgcggatcctccaactaccttcaaccaagctaagctggcgtcgttcatcacgcagtacagcaccggacaggtcagcgtggaaattgaatgggagctgcagaaagaaaacagcaaacgctggaacccagagattcaatacacttccaactactacaaatctacaaatgtggactttgctgttaacacagagggcacttattctgagcctcgccccatcggcacccgttacctcacccgtaatctgtaa

SEQ ID NO: 239 - DNA, 2607 bp, Artificial Sequence
  LBV40
atggctgccgatggttatcttccagattggctcgaggacaacctctctgagggcattcgcgagtggtgggacttgaaacctggagccccgaaacccaaagccaaccagcaaaagcaggacaacggccggggtctggtgcttcctggctacaagtacctcggacccttcaacggactcgacaagggggagcccgtcaacgcggcggacgcagcggccctcgagcacgacaaggcctacgaccagcagctccaagcgggtgacaatccgtacctgcggtataaccacgccgacgccgagtttcaggagcgtctgcaagaagatacgtcttttgggggcaacctcgggcgagcagtcttccaggccaagaagcgggttctcgaacctctcggtctggttgagtctcctgtgaagacggctcctggaaagaagagaccggtagagccatcaccccagcgttctccagactcctctacgggcatcggcaagaaaggccagcagcccgcgaaaaagagactcaactttgggcagactggcgactcagagtcagtgcccgaccctcaaccaatcggagaaccccccgcaggcccctctggtctgggatctggtacaatggctgcaggcggtggcgctccaatggcagacaataacgaaggcgccgacggagtgggtagttcctcaggaaattggcattgcgattccacatggctgggcgacagagtcatcaccaccagcacccgaacctgggccctccccacctacaacaaccacctctacaagcaaatctccaacgggacttcgggaggaagcaccaacgacaacacctacttcggctacagcaccccctgggggtattttgactttaacagattccactgccacttctcaccacgtgactggcagcgactcatcaacaacaactggggattccggcccaagagactcaacttcaagctcttcaacatccaggtcaaggaggtcacgcagaatgaaggcaccaagaccatcgccaataaccttaccagcacgattcaggtctttacggactcggaataccagctcccgtacgtcctcggctctgcgcaccagggctgcctgcctccgttcccggcggacgtcttcatgattcctcagtacgggtacctgactctgaacaatggcagtcaggccgtgggccgttcctccttctactgcctggagtactttccttctcaaatgctgagaacgggcaacaactttgagttcagctacaactttgaggacgtgccttttcacagcagctacgcgcacagccaaagcctggaccggctgatgaaccccctcatcgaccagtacctgtactacctgtctcggactcagtccacgggaggtaccgcaggaactcagcagttgctattttctcaggccgggcctaataacatgtcggctcaggccaaaaactggctacccgggccctgctaccggcagcaacgcgtctccacgacactgtcgcaaaataacaacagcaactttgcctggaccggtgccaccaagtatcatctgaatggcagagactctctggtaaatcccggtgtcgctatggcaacccacaaggacgacgaagagcgattttttccgtccagcggagtcttaatgtttgggaaacagggagctggaaaagacaacgtggactatagcagcgttatgctaaccagtgaggaagaaattaaaaccaccaacccagtggccacagaacagtacggcgtggtggccgataacctgcaacagcaaggtggaggtggatctggaggaggtgggagtgggggtgggggctccgggggtgggggtagtggcggcggcgggtcaagttctgattctccccgcaaccttgaggttacgaatgccacaccgaactctctcacgatttcttgggactatcccaggtataatgcattgtattacaggattacttatggagagactggcggcaattccccttcccaggaattcaccgttccacgatactacagctatgccacaatctcaggtcttttcccaggtcaagactatactataacggtctatgcagtctcacggtataaccactattcaaacccgatatcaataaactaccgcactgagatagataagccttctcaaggatcaggtggcgggggtgcaaacgccgctcctattgtaggggccgtcaacagtcaaggagccttacctggcatggtctggcagaaccgggacgtgtacctgcagggtcctatctgggccaagattcctcacacggacggaaactttcatccctcgccgctgatgggaggctttggactgaaacacccgcctcctcagatcctgattaagaatacacctgttcccgcggatcctccaactaccttcaaccaagctaagctggcgtcgttcatcacgcagtacagcaccggacaggtcagcgtggaaattgaatgggagctgcagaaagaaaacagcaaacgctggaacccagagattcaatacacttccaactactacaaatctacaaatgtggactttgctgttaacacagagggcacttattctgagcctcgccccatcggcacccgttacctcacccgtaatctgtaa

SEQ ID NO: 240 - DNA, 2244 bp, Artificial Sequence; identical to SEQ ID NO: 232
  LBV77

SEQ ID NO: 241 - DNA, 1806 bp, Artificial Sequence; identical to SEQ ID NO: 181
  LBV28

SEQ ID NO: 242 - DNA, 1806 bp, Artificial Sequence; identical to SEQ ID NO: 181
  LBV40

SEQ ID NO: 243 - protein, 941 aa, Artificial Sequence
  LBV108
MAADGYLPDWLEDNLSEGIREWWDLKPGAPKPKANQQKQDNGRGLVLPGYKYLGPFNGLDKGEPVNAADAAALEHDKAYDQQLQAGDNPYLRYNHADAEFQERLQEDTSFGGNLGRAVFQAKKRVLEPLGLVESPVKTAPGKKRPVEPSPQRSPDSSTGIGKKGQQPAKKRLNFGQTGDSESVPDPQPIGEPPAGPSGLGSGTMAAGGGAPMADNNEGADGVGSSSGNWHCDSTWLGDRVITTSTRTWALPTYNNHLYKQISNGTSGGSTNDNTYFGYSTPWGYFDFNRFHCHFSPRDWQRLINNNWGFRPKRLNFKLFNIQVKEVTQNEGTKTIANNLTSTIQVFTDSEYQLPYVLGSAHQGCLPPFPADVFMIPQYGYLTLNNGSQAVGRSSFYCLEYFPSQMLRTGNNFEFSYNFEDVPFHSSYAHSQSLDRLMNPLIDQYLYYLSRTQSTGGTAGTQQLLFSQAGPNNMSAQAKNWLPGPCYRQQRVSTTLSQNNNSNFAWTGATKYHLNGRDSLVNPGVAMATHKDDEERFFPSSGVLMFGKQGAGKDNVDYSSVMLTSEEEIKTTNPVATEQYGVVADNLQQQGGGGSGGGGSGGGGSGGGGSGGGGSNTIHEFKKSAKTTLIKIDPALKIKTKKVNTADQCANRCTRNKGLPFTCKAFVFDKARKQCLWFPFNSMSSGVKKEFGHEFDLYENKDYIRNCIIGKGRSYKGTASATKSGIKCQPWSSMIPHEHSFLPSSYRGKDLQENYCRNPRGEEGGPWCFTSNPEVRYEVCDIPQCSEGKGGGGAAAPIVGAVNSQGALPGMVWQNRDVYLQGPIWAKIPHTDGNFHPSPLMGGFGLKHPPPQILIKNTPVPADPPTTFNQAKLASFITQYSTGQVSVEIEWELQKENSKRWNPEIQYTSNYYKSTNVDFAVNTEGTYSEPRPIGTRYLTRNL

SEQ ID NO: 244 - protein, 941 aa, Artificial Sequence
  LBV109
MAADGYLPDWLEDNLSEGIREWWDLKPGAPKPKANQQKQDNGRGLVLPGYKYLGPFNGLDKGEPVNAADAAALEHDKAYDQQLQAGDNPYLRYNHADAEFQERLQEDTSFGGNLGRAVFQAKKRVLEPLGLVESPVKTAPGKKRPVEPSPQRSPDSSTGIGKKGQQPAKKRLNFGQTGDSESVPDPQPIGEPPAGPSGLGSGTMAAGGGAPMADNNEGADGVGSSSGNWHCDSTWLGDRVITTSTRTWALPTYNNHLYKQISNGTSGGSTNDNTYFGYSTPWGYFDFNRFHCHFSPRDWQRLINNNWGFRPKRLNFKLFNIQVKEVTQNEGTKTIANNLTSTIQVFTDSEYQLPYVLGSAHQGCLPPFPADVFMIPQYGYLTLNNGSQAVGRSSFYCLEYFPSQMLRTGNNFEFSYNFEDVPFHSSYAHSQSLDRLMNPLIDQYLYYLSRTQSTGGTAGTQQLLFSQAGPNNMSAQAKNWLPGPCYRQQRVSTTLSQNNNSNFAWTGATKYHLNGRDSLVNPGVAMATHKDDEERFFPSSGVLMFGKQGAGKDNVDYSSVMLTSEEEIKTTNPVATEQYGVVADNLQQQGGGGSGGGGSGGGGSGGGGSGGGGSNTIHEFKKSAKTTLIKIDPALKIKTKKVNTADQCANRCTRNKGLPFTCKAFVFDKARKQCLWFPFNSMSSGVKKEFGHEFDLYENKDYIRACIIGKGRSYKGTVSITKSGIKCQPWSSMIPHEHSFLPSSYRGKDLQENYCRNPRGEEGGPWCFTSNPEVRYEVCDIPQCSEGKGGGGAAAPIVGAVNSQGALPGMVWQNRDVYLQGPIWAKIPHTDGNFHPSPLMGGFGLKHPPPQILIKNTPVPADPPTTFNQAKLASFITQYSTGQVSVEIEWELQKENSKRWNPEIQYTSNYYKSTNVDFAVNTEGTYSEPRPIGTRYLTRNL

SEQ ID NO: 245 - protein, 890 aa, Artificial Sequence
  LBV110
MAADGYLPDWLEDNLSEGIREWWDLKPGAPKPKANQQKQDNGRGLVLPGYKYLGPFNGLDKGEPVNAADAAALEHDKAYDQQLQAGDNPYLRYNHADAEFQERLQEDTSFGGNLGRAVFQAKKRVLEPLGLVESPVKTAPGKKRPVEPSPQRSPDSSTGIGKKGQQPAKKRLNFGQTGDSESVPDPQPIGEPPAGPSGLGSGTMAAGGGAPMADNNEGADGVGSSSGNWHCDSTWLGDRVITTSTRTWALPTYNNHLYKQISNGTSGGSTNDNTYFGYSTPWGYFDFNRFHCHFSPRDWQRLINNNWGFRPKRLNFKLFNIQVKEVTQNEGTKTIANNLTSTIQVFTDSEYQLPYVLGSAHQGCLPPFPADVFMIPQYGYLTLNNGSQAVGRSSFYCLEYFPSQMLRTGNNFEFSYNFEDVPFHSSYAHSQSLDRLMNPLIDQYLYYLSRTQSTGGTAGTQQLLFSQAGPNNMSAQAKNWLPGPCYRQQRVSTTLSQNNNSNIAWTRATKYHLNGRDSLVNPGVAMATHKDDEERFFPSSGVLMFGKQGAGKDNVDYSSVMLTSEEEIKTTNPVATEQYGVVADNLQQQGGGGSGGGGSGGGGSGGGGSGGGGSEVQLQASGGGFVQAGGSLRLSCAVSGRGDLSTPSYGMHWVRQAPGKEREFVAGISRGDYNSLYYADSVQGRFTISRDNAKNTVYLQMNSLKPEDTATYYCAENRRGDFNNTYWGQGTQVTVSSGGGGSAAPIVGAVNSQGALPGMVWQNRDVYLQGPIWAKIPHTDGNFHPSPLMGGFGLKHPPPQILIKNTPVPADPPTTFNQAKLASFITQYSTGQVSVEIEWELQKENSKRWNPEIQYTSNYCKSTNVDFAVNTEGTYSEPRPIGTRYLTRNL

SEQ ID NO: 246 - protein, 890 aa, Artificial Sequence; identical to SEQ ID NO: 245
  LBV111

SEQ ID NO: 247 - protein, 889 aa, Artificial Sequence; identical to SEQ ID NO: 53
  LBV112

SEQ ID NO: 248 - protein, 889 aa, Artificial Sequence
  LBV113
MAADGYLPDWLEDNLSEGIREWWALKPGAPQPKANQQHQDNARGLVLPGYKYLGPGNGLDKGEPVNAADAAALEHDKAYDQQLKAGDNPYLKYNHADAEFQERLKEDTSFGGNLGRAVFQAKKRLLEPLGLVEEAAKTAPGKKRPVEQSPQEPDSSAGIGKSGAQPAKKRLNFGQTGDTESVPDPQPIGEPPAAPSGVGSLTMASGGGAPVADNNEGADGVGSSSGNWHCDSQWLGDRVITTSTRTWALPTYNNHLYKQISNSTSGGSSNDNAYFGYSTPWGYFDFNRFHCHFSPRDWQRLINNNWGFRPKRLNFKLFNIQVKEVTDNNGVKTIANNLTSTVQVFTDSDYQLPYVLGSAHEGCLPPFPADVFMIPQYGYLTLNDGSQAVGRSSFYCLEYFPSQMLRTGNNFQFSYEFENVPFHSSYAHSQSLDRLMNPLIDQYLYYLSKTINGSGQNQQTLKFSVAGPSNMAVQGRNYIPGPSYRQQRVSTTVTQNNISEFAWPGASSWALNGRNSLMNPGPAMASHKEGEDRFFPLSGSLIFGKQGTGRDNVDADKVMITNEEEIKTTNPVATESYGQVATNHQSAQGGGGSGGGGSGGGGSGGGGSGGGGSEVQLQASGGGFVQAGGSLRLSCAVSGRGDLSTPSYGMHWVRQAPGKEREFVAGISRGDYNSLYYADSVQGRFTISRDNAKNTVYLQMNSLKPEDTATYYCAENRRGDFNNTYWGQGTQVTVSSGGGGSAQAQTGWVQNQGILPGMVWQDRDVYLQGPIWAKIPHTDGNFHPSPLMGGFGMKHPPPQILIKNTPVPADPPTAFNKDKLNSFITQYSTGQVSVEIEWELQKENSKRWNPEIQYTSNYYKSNNVEFAVNTEGVYSEPRPIGTRYLTRNL

SEQ ID NO: 249 - protein, 889 aa, Artificial Sequence; identical to SEQ ID NO: 248
  LBV114

SEQ ID NO: 250 - protein, 889 aa, Artificial Sequence; identical to SEQ ID NO: 53
  LBV115

SEQ ID NO: 251 - protein, 889 aa, Artificial Sequence; identical to SEQ ID NO: 53
  LBV116

SEQ ID NO: 252 - protein, 889 aa, Artificial Sequence
  LBV117
MAADGYLPDWLEDNLSEGIREWWALKPGAPQPKANQQHQDNARGLVLPGYKYLGPGNGLDKGEPVNAADAAALEHDKAYDQQLKAGDNPYLKYNHADAEFQERLKEDTSFGGNLGRAVFQAKKRLLEPLGLVEEAAKTAPGKKRPVEQSPQEPDSSAGIGKSGAQPAKKRLNFGQTGDTESVPDPQPIGEPPAAPSGVGSLTMASGGGAPVADNNEGADGVGSSSGNWHCDSQWLGDRVITTSTRTWALPTYNNHLYKQISNSTSGGSSNDNAYFGYSTPWGYFDFNRFHCHFSPRDWQRLINNNWGFRPKRLNFKLFNIQVKEVTDNNGVKTIANNLTSTVQVFTDSDYQLPYVLGSAHEGCLPPFPADVFMIPQYGYLTLNDGSQAVGRSSFYCLEYFPSQMLRTGNNFQFSYEFENVPFHSSYAHSQSLDRLMNPLIDQYLYYLSKTINGSGQNQQTLKFSVAGPSNMAVQGRNYIPGPSYRQQRVSTTVTQNNNSEFAWPRASSWALNGRNSLMNPGPAMASHKEGEDRFFPLSGSLIFGKQGTGRDNVDADKVMITNEEEIKTTNPVATESYGQVATNHQSAQGGGGSGGGGSGGGGSGGGGSGGGGSEVQLQASGGGFVQAGGSLRLSCAVSGRGDLSTPSYGMHWVRQAPGKEREFVAGISRGDYNSLYYADSVQGRFTISRDNAKNTVYLQMNSLKPEDTATYYCAENRRGDFNNTYWGQGTQVTVSSGGGGSAQAQTGWVQNQGILPGMVWQDRDVYLQGPIWAKIPHTDGNFHPSPLMGGFGMKHPPPQILIKNTPVPADPPTAFNKDKLNSFITQYSTGQVSVEIEWELQKENSKRWNPEIQYTSNYYKSNNVEFAVNTEGVYSEPRPIGTRYLTRNL

SEQ ID NO: 253 - protein, 889 aa, Artificial Sequence; identical to SEQ ID NO: 252
  LBV118

SEQ ID NO: 254 - protein, 738 aa, Artificial Sequence
  LBV120
MAADGYLPDWLEDNLSEGIREWWDLKPGAPKPKANQQKQDNGRGLVLPGYKYLGPFNGLDKGEPVNAADAAALEHDKAYDQQLQAGDNPYLRYNHADAEFQERLQEDTSFGGNLGRAVFQAKKRVLEPLGLVESPVKTAPGKKRPVEPSPQRSPDSSTGIGKKGQQPAKKRLNFGQTGDSESVPDPQPIGEPPAGPSGLGSGTMAAGGGAPMADNNEGADGVGSSSGNWHCDSTWLGDRVITTSTRTWALPTYNNHLYKQISNGTSGGSTNDNTYFGYSTPWGYFDFNRFHCHFSPRDWQRLINNNWGFRPKRLNFKLFNIQVKEVTQNEGTKTIANNLTSTIQVFTDSEYQLPYVLGSAHQGCLPPFPADVFMIPQYGYLTLNNGSQAVGRSSFYCLEYFPSQMLRTGNNFEFSYNFEDVPFHSSYAHSQSLDRLMNPLIDQYLYYLSRTQSTGGTAGTQQLLFSQAGPNNMSAQAKNWLPGPCYRQQRVSTTLSQNNNSNIAWTRATKYHLNGRDSLVNPGVAMATHKDDEERFFPSSGVLMFGKQGAGKDNVDYSSVMLTSEEEIKTTNPVATEQYGVVADNLQQQNAAPIVGAVNSQGALPGMVWQNRDVYLQGPIWAKIPHTDGNFHPSPLMGGFGLKHPPPQILIKNTPVPADPPTTFNQAKLASFITQYSTGQVSVEIEWELQKENSKRWNPEIQYTSNYCKSTNVDFAVNTEGTYSEPRPIGTRYLTRNL

SEQ ID NO: 255 - protein, 889 aa, Artificial Sequence; identical to SEQ ID NO: 53
  LBV121

SEQ ID NO: 256 - protein, 601 aa, Artificial Sequence; identical to SEQ ID NO: 84
  LBV108

SEQ ID NO: 257 - protein, 601 aa, Artificial Sequence; identical to SEQ ID NO: 84
  LBV109

SEQ ID NO: 258 - protein, 607 aa, Artificial Sequence; identical to SEQ ID NO: 124
  LBV110

SEQ ID NO: 259 - protein, 601 aa, Artificial Sequence
  LBV111
TAPGKKRPVEPSPQRSPDSSTGIGKKGQQPAKKRLNFGQTGDSESVPDPQPIGEPPAGPSGLGSGTMAAGGGAPMADNNEGADGVGSSSGNWHCDSTWLGDRVITTSTRTWALPTYNNHLYKQISNGTSGGSTNDNTYFGYSTPWGYFDFNRFHCHFSPRDWQRLINNNWGFRPKRLNFKLFNIQVKEVTQNEGTKTIANNLTSTIQVFTDSEYQLPYVLGSAHQGCLPPFPADVFMIPQYGYLTLNNGSQAVGRSSFYCLEYFPSQMLRTGNNFEFSYNFEDVPFHSSYAHSQSLDRLMNPLIDQYLYYLSRTQSTGGTAGTQQLLFSQAGPNNMSAQAKNWLPGPCYRQQRVSTTLSQNNNSNIAWTRATKYHLNGRDSLVNPGVAMATHKDDEERFFPSSGVLMFGKQGAGKDNVDYSSVMLTSEEEIKTTNPVATEQYGVVADNLQQQNAAPIVGAVNSQGALPGMVWQNRDVYLQGPIWAKIPHTDGNFHPSPLMGGFGLKHPPPQILIKNTPVPADPPTTFNQAKLASFITQYSTGQVSVEIEWELQKENSKRWNPEIQYTSNYCKSTNVDFAVNTEGTYSEPRPIGTRYLTRNL

SEQ ID NO: 260 - protein, 599 aa, Artificial Sequence
  LBV112
TAPGKKRPVEQSPQEPDSSAGIGKSGAQPAKKRLNFGQTGDTESVPDPQPIGEPPAAPSGVGSLTMASGGGAPVADNNEGADGVGSSSGNWHCDSQWLGDRVITTSTRTWALPTYNNHLYKQISNSTSGGSSNDNAYFGYSTPWGYFDFNRFHCHFSPRDWQRLINNNWGFRPKRLNFKLFNIQVKEVTDNNGVKTIANNLTSTVQVFTDSDYQLPYVLGSAHEGCLPPFPADVFMIPQYGYLTLNDGSQAVGRSSFYCLEYFPSQMLRTGNNFQFSYEFENVPFHSSYAHSQSLDRLMNPLIDQYLYYLSKTINGSGQNQQTLKFSVAGPSNMAVQGRNYIPGPSYRQQRVSTTVTQNNNSEFAWPGASSWALNGRNSLMNPGPAMASHKEGEDRFFPLSGSLIFGKQGTGRDNVDADKVMITNEEEIKTTNPVATESYGQVATNHQSAQAAAQTGWVQNQGILPGMVWQDRDVYLQGPIWAKIPHTDGNFHPSPLMGGFGMKHPPPQILIKNTPVPADPPTAFNKDKLNSFITQYSTGQVSVEIEWELQKENSKRWNPEIQYTSNYYKSNNVEFAVNTEGVYSEPRPIGTRYLTRNL

SEQ ID NO: 261 - protein, 599 aa, Artificial Sequence
  LBV113
TAPGKKRPVEQSPQEPDSSAGIGKSGAQPAKKRLNFGQTGDTESVPDPQPIGEPPAAPSGVGSLTMASGGGAPVADNNEGADGVGSSSGNWHCDSQWLGDRVITTSTRTWALPTYNNHLYKQISNSTSGGSSNDNAYFGYSTPWGYFDFNRFHCHFSPRDWQRLINNNWGFRPKRLNFKLFNIQVKEVTDNNGVKTIANNLTSTVQVFTDSDYQLPYVLGSAHEGCLPPFPADVFMIPQYGYLTLNDGSQAVGRSSFYCLEYFPSQMLRTGNNFQFSYEFENVPFHSSYAHSQSLDRLMNPLIDQYLYYLSKTINGSGQNQQTLKFSVAGPSNMAVQGRNYIPGPSYRQQRVSTTVTQNNISEFAWPGASSWALNGRNSLMNPGPAMASHKEGEDRFFPLSGSLIFGKQGTGRDNVDADKVMITNEEEIKTTNPVATESYGQVATNHQSAQAQAQTGWVQNQGILPGMVWQDRDVYLQGPIWAKIPHTDGNFHPSPLMGGFGMKHPPPQILIKNTPVPADPPTAFNKDKLNSFITQYSTGQVSVEIEWELQKENSKRWNPEIQYTSNYYKSNNVEFAVNTEGVYSEPRPIGTRYLTRNL

SEQ ID NO: 262 - protein, 606 aa, Artificial Sequence
  LBV114
TAPGKKRPVEQSPQEPDSSAGIGKSGAQPAKKRLNFGQTGDTESVPDPQPIGEPPAAPSGVGSLTMASGGGAPVADNNEGADGVGSSSGNWHCDSQWLGDRVITTSTRTWALPTYNNHLYKQISNSTSGGSSNDNAYFGYSTPWGYFDFNRFHCHFSPRDWQRLINNNWGFRPKRLNFKLFNIQVKEVTDNNGVKTIANNLTSTVQVFTDSDYQLPYVLGSAHEGCLPPFPADVFMIPQYGYLTLNDGSQAVGRSSFYCLEYFPSQMLRTGNNFQFSYEFENVPFHSSYAHSQSLDRLMNPLIDQYLYYLSKTINGSGQNQQTLKFSVAGPSNMAVQGRNYIPGPSYRQQRVSTTVTQNNISEFAWPGASSWALNGRNSLMNPGPAMASHKEGEDRFFPLSGSLIFGKQGTGRDNVDADKVMITNEEEIKTTNPVATESYGQVATNHQSAQRGDYVGLAQAQTGWVQNQGILPGMVWQDRDVYLQGPIWAKIPHTDGNFHPSPLMGGFGMKHPPPQILIKNTPVPADPPTAFNKDKLNSFITQYSTGQVSVEIEWELQKENSKRWNPEIQYTSNYYKSNNVEFAVNTEGVYSEPRPIGTRYLTRNL

SEQ ID NO: 263 - protein, 599 aa, Artificial Sequence
  LBV115
TAPGKKRPVEQSPQEPDSSAGIGKSGAQPAKKRLNFGQTGDTESVPDPQPIGEPPAAPSGVGSLTMASGGGAPVADNNEGADGVGSSSGNWHCDSQWLGDRVITTSTRTWALPTYNNHLYKQISNSTSGGSSNDNAYFGYSTPWGYFDFNRFHCHFSPRDWQRLINNNWGFRPKRLNFKLFNIQVKEVTDNNGVKTIANNLTSTVQVFTDSDYQLPYVLGSAHEGCLPPFPADVFMIPQYGYLTLNDGSQAVGRSSFYCLEYFPSQMLRTGNNFQFSYEFENVPFHSSYAHSQSLDRLMNPLIDQYLYYLSKTINGSGQNQQTLKFSVAGPSNMAVQGRNYIPGPSYRQQRVSTTVTQNNNSEFAWPGASSWALNGRNSLMNPGPAMASHKEGEDRFFPLSGSLIFGKQGTGRDNVDADKVMITNEEEIKTTNPVATESYGQVATNHQQQNAAAQTGWVQNQGILPGMVWQDRDVYLQGPIWAKIPHTDGNFHPSPLMGGFGMKHPPPQILIKNTPVPADPPTAFNKDKLNSFITQYSTGQVSVEIEWELQKENSKRWNPEIQYTSNYYKSNNVEFAVNTEGVYSEPRPIGTRYLTRNL

SEQ ID NO: 264 - protein, 606 aa, Artificial Sequence
  LBV116
TAPGKKRPVEQSPQEPDSSAGIGKSGAQPAKKRLNFGQTGDTESVPDPQPIGEPPAAPSGVGSLTMASGGGAPVADNNEGADGVGSSSGNWHCDSQWLGDRVITTSTRTWALPTYNNHLYKQISNSTSGGSSNDNAYFGYSTPWGYFDFNRFHCHFSPRDWQRLINNNWGFRPKRLNFKLFNIQVKEVTDNNGVKTIANNLTSTVQVFTDSDYQLPYVLGSAHEGCLPPFPADVFMIPQYGYLTLNDGSQAVGRSSFYCLEYFPSQMLRTGNNFQFSYEFENVPFHSSYAHSQSLDRLMNPLIDQYLYYLSKTITTGGHSSQTLKFSVAGPSNMAVQGRNYIPGPSYRQQRVSTTVTQNNNSEFAWPGASSWALNGRNSLMNPGPAMASHKEGEDRFFPLSGSLIFGKQGTGRDNVDADKVMITNEEEIKTTNPVATESYGQVATNHQSAQRGDYVGLAQAQTGWVQNQGILPGMVWQDRDVYLQGPIWAKIPHTDGNFHPSPLMGGFGMKHPPPQILIKNTPVPADPPTAFNKDKLNSFITQYSTGQVSVEIEWELQKENSKRWNPEIQYTSNYYKSNNVEFAVNTEGVYSEPRPIGTRYLTRNL

SEQ ID NO: 265 - protein, 599 aa, Artificial Sequence
  LBV117
TAPGKKRPVEQSPQEPDSSAGIGKSGAQPAKKRLNFGQTGDTESVPDPQPIGEPPAAPSGVGSLTMASGGGAPVADNNEGADGVGSSSGNWHCDSQWLGDRVITTSTRTWALPTYNNHLYKQISNSTSGGSSNDNAYFGYSTPWGYFDFNRFHCHFSPRDWQRLINNNWGFRPKRLNFKLFNIQVKEVTDNNGVKTIANNLTSTVQVFTDSDYQLPYVLGSAHEGCLPPFPADVFMIPQYGYLTLNDGSQAVGRSSFYCLEYFPSQMLRTGNNFQFSYEFENVPFHSSYAHSQSLDRLMNPLIDQYLYYLSKTINGSGQNQQTLKFSVAGPSNMAVQGRNYIPGPSYRQQRVSTTVTQNNNSEFAWPRASSWALNGRNSLMNPGPAMASHKEGEDRFFPLSGSLIFGKQGTGRDNVDADKVMITNEEEIKTTNPVATESYGQVATNHQSAQAQAQTGWVQNQGILPGMVWQDRDVYLQGPIWAKIPHTDGNFHPSPLMGGFGMKHPPPQILIKNTPVPADPPTAFNKDKLNSFITQYSTGQVSVEIEWELQKENSKRWNPEIQYTSNYYKSNNVEFAVNTEGVYSEPRPIGTRYLTRNL

SEQ ID NO: 266 - protein, 606 aa, Artificial Sequence
  LBV118
TAPGKKRPVEQSPQEPDSSAGIGKSGAQPAKKRLNFGQTGDTESVPDPQPIGEPPAAPSGVGSLTMASGGGAPVADNNEGADGVGSSSGNWHCDSQWLGDRVITTSTRTWALPTYNNHLYKQISNSTSGGSSNDNAYFGYSTPWGYFDFNRFHCHFSPRDWQRLINNNWGFRPKRLNFKLFNIQVKEVTDNNGVKTIANNLTSTVQVFTDSDYQLPYVLGSAHEGCLPPFPADVFMIPQYGYLTLNDGSQAVGRSSFYCLEYFPSQMLRTGNNFQFSYEFENVPFHSSYAHSQSLDRLMNPLIDQYLYYLSKTINGSGQNQQTLKFSVAGPSNMAVQGRNYIPGPSYRQQRVSTTVTQNNNSEFAWPRASSWALNGRNSLMNPGPAMASHKEGEDRFFPLSGSLIFGKQGTGRDNVDADKVMITNEEEIKTTNPVATESYGQVATNHQSAQRGDYVGLAQAQTGWVQNQGILPGMVWQDRDVYLQGPIWAKIPHTDGNFHPSPLMGGFGMKHPPPQILIKNTPVPADPPTAFNKDKLNSFITQYSTGQVSVEIEWELQKENSKRWNPEIQYTSNYYKSNNVEFAVNTEGVYSEPRPIGTRYLTRNL

SEQ ID NO: 267 - protein, 606 aa, Artificial Sequence; identical to SEQ ID NO: 129
  LBV121

SEQ ID NO: 268 - DNA, 2826 bp, Artificial Sequence
  LBV108
atggctgccgatggttatcttccggattggctcgaggacaacctctctgagggcattcgcgagtggtgggacttgaaacctggagccccgaaacccaaagccaaccagcaaaagcaggacaacggccggggtctggtgcttcctggctacaagtacctcggacccttcaacggactcgacaagggggagcccgtcaacgcggcggacgcagcggccctcgagcacgacaaggcctacgaccagcagctccaagcgggtgacaatccgtacctgcggtataaccacgccgacgccgagtttcaggagcgtctgcaagaagatacgtcttttgggggcaacctcgggcgagcagtcttccaggccaagaagcgggttctcgaacctctcggtctggttgagtctcctgtgaagacggctcctggaaagaagagaccggtagagccatcaccccagcgttctccagactcctctacgggcatcggcaagaaaggccagcagcccgcgaaaaagagactcaactttgggcagactggcgactcagagtcagtgcccgaccctcaaccaatcggagaaccccccgcaggcccctctggtctgggatctggtacaatggctgcaggcggtggcgctccaatggcagacaataacgaaggcgccgacggagtgggtagttcctcaggaaattggcattgcgattccacatggctgggcgacagagtcatcaccaccagcacccgaacctgggccctccccacctacaacaaccacctctacaagcaaatctccaacgggacttcgggaggaagcaccaacgacaacacctacttcggctacagcaccccctgggggtattttgactttaacagattccactgccacttctcaccacgtgactggcagcgactcatcaacaacaactggggattccggcccaagagactcaacttcaagctcttcaacatccaggtcaaggaggtcacgcagaatgaaggcaccaagaccatcgccaataaccttaccagcacgattcaggtctttacggactcggaataccagctcccgtacgtcctcggctctgcgcaccagggctgcctgcctccgttcccggcggacgtcttcatgattcctcagtacgggtacctgactctgaacaatggcagtcaggccgtgggccgttcctccttctactgcctggagtactttccttctcaaatgctgagaacgggcaacaactttgagttcagctacaactttgaggacgtgccttttcacagcagctacgcgcacagccaaagcctggaccggctgatgaaccccctcatcgaccagtacctgtactacctgtctcggactcagtccacgggaggtaccgcaggaactcagcagttgctattttctcaggccgggcctaataacatgtcggctcaggccaaaaactggctacccgggccctgctaccggcagcaacgcgtctccacgacactgtcgcaaaataacaacagcaactttgcctggaccggtgccaccaagtatcatctgaatggcagagactctctggtaaatcccggtgtcgctatggcaacccacaaggacgacgaagagcgattttttccgtccagcggagtcttaatgtttgggaaacagggagctggaaaagacaacgtggactatagcagcgttatgctaaccagtgaggaagaaattaaaaccaccaacccagtggccacagaacagtacggcgtggtggccgataacctgcaacagcaaggtggtggtggatctggaggtggcgggtctggcggcggaggatctggtgggggaggctccggaggcggaggtagcaatacaattcatgaattcaaaaaatcagcaaagactaccctaatcaaaatagatccagcactgaagataaaaaccaaaaaagtgaatactgcagaccaatgtgctaatagatgtactaggaataaaggacttccattcacttgcaaggcttttgtttttgataaagcaagaaaacaatgcctctggttccccttcaatagcatgtcaagtggagtgaaaaaagaatttggccatgaatttgacctctatgaaaacaaagactacattagaaactgcatcattggtaaaggacgcagctacaagggaacagcatctgcaactaagagtggcatcaaatgtcagccctggagttccatgataccacacgaacacagctttttgccttcgagctatcggggtaaagacctacaggaaaactactgtcgaaatcctcgaggggaagaagggggaccctggtgtttcacaagcaatccagaggtacgctacgaagtctgtgacattcctcagtgttcagaaggtaaaggcgggggtggtgcagccgctcctattgtaggggccgtcaacagtcaaggagccttacctggcatggtctggcagaaccgggacgtgtacctgcagggtcctatctgggccaagattcctcacacggacggaaactttcatccctcgccgctgatgggaggctttggactgaaacacccgcctcctcagatcctgattaagaatacacctgttcccgcggatcctccaactaccttcaaccaagctaagctggcgtcgttcatcacgcagtacagcaccggacaggtcagcgtggaaattgaatgggagctgcagaaagaaaacagcaaacgctggaacccagagattcaatacacttccaactactacaaatctacaaatgtggactttgctgttaacacagagggcacttattctgagcctcgccccatcggcacccgttacctcacccgtaatctgtaa

SEQ ID NO: 269 - DNA, 2826 bp, Artificial Sequence
  LBV109
atggctgccgatggttatcttccggattggctcgaggacaacctctctgagggcattcgcgagtggtgggacttgaaacctggagccccgaaacccaaagccaaccagcaaaagcaggacaacggccggggtctggtgcttcctggctacaagtacctcggacccttcaacggactcgacaagggggagcccgtcaacgcggcggacgcagcggccctcgagcacgacaaggcctacgaccagcagctccaagcgggtgacaatccgtacctgcggtataaccacgccgacgccgagtttcaggagcgtctgcaagaagatacgtcttttgggggcaacctcgggcgagcagtcttccaggccaagaagcgggttctcgaacctctcggtctggttgagtctcctgtgaagacggctcctggaaagaagagaccggtagagccatcaccccagcgttctccagactcctctacgggcatcggcaagaaaggccagcagcccgcgaaaaagagactcaactttgggcagactggcgactcagagtcagtgcccgaccctcaaccaatcggagaaccccccgcaggcccctctggtctgggatctggtacaatggctgcaggcggtggcgctccaatggcagacaataacgaaggcgccgacggagtgggtagttcctcaggaaattggcattgcgattccacatggctgggcgacagagtcatcaccaccagcacccgaacctgggccctccccacctacaacaaccacctctacaagcaaatctccaacgggacttcgggaggaagcaccaacgacaacacctacttcggctacagcaccccctgggggtattttgactttaacagattccactgccacttctcaccacgtgactggcagcgactcatcaacaacaactggggattccggcccaagagactcaacttcaagctcttcaacatccaggtcaaggaggtcacgcagaatgaaggcaccaagaccatcgccaataaccttaccagcacgattcaggtctttacggactcggaataccagctcccgtacgtcctcggctctgcgcaccagggctgcctgcctccgttcccggcggacgtcttcatgattcctcagtacgggtacctgactctgaacaatggcagtcaggccgtgggccgttcctccttctactgcctggagtactttccttctcaaatgctgagaacgggcaacaactttgagttcagctacaactttgaggacgtgccttttcacagcagctacgcgcacagccaaagcctggaccggctgatgaaccccctcatcgaccagtacctgtactacctgtctcggactcagtccacgggaggtaccgcaggaactcagcagttgctattttctcaggccgggcctaataacatgtcggctcaggccaaaaactggctacccgggccctgctaccggcagcaacgcgtctccacgacactgtcgcaaaataacaacagcaactttgcctggaccggtgccaccaagtatcatctgaatggcagagactctctggtaaatcccggtgtcgctatggcaacccacaaggacgacgaagagcgattttttccgtccagcggagtcttaatgtttgggaaacagggagctggaaaagacaacgtggactatagcagcgttatgctaaccagtgaggaagaaattaaaaccaccaacccagtggccacagaacagtacggcgtggtggccgataacctgcaacagcaaggtggtggtggatctggaggtggcgggtctggcggcggaggatctggtgggggaggctccggaggcggaggtagcaatacaattcatgaattcaaaaaatcagcaaagactaccctaatcaaaatagatccagcactgaagataaaaaccaaaaaagtgaatactgcagaccaatgtgctaatagatgtactaggaataaaggacttccattcacttgcaaggcttttgtttttgataaagcaagaaaacaatgcctctggttccccttcaatagcatgtcaagtggagtgaaaaaagaatttggccatgaatttgacctctatgaaaacaaagactacattagagcatgcatcattggtaaaggacgcagctacaagggaacagtatctatcactaagagtggcatcaaatgtcagccctggagttccatgataccacacgaacacagctttttgccttcgagctatcggggtaaagacctacaggaaaactactgtcgaaatcctcgaggggaagaagggggaccctggtgtttcacaagcaatccagaggtacgctacgaagtctgtgacattcctcagtgttcagaaggtaaaggcgggggtggtgcagccgctcctattgtaggggccgtcaacagtcaaggagccttacctggcatggtctggcagaaccgggacgtgtacctgcagggtcctatctgggccaagattcctcacacggacggaaactttcatccctcgccgctgatgggaggctttggactgaaacacccgcctcctcagatcctgattaagaatacacctgttcccgcggatcctccaactaccttcaaccaagctaagctggcgtcgttcatcacgcagtacagcaccggacaggtcagcgtggaaattgaatgggagctgcagaaagaaaacagcaaacgctggaacccagagattcaatacacttccaactactacaaatctacaaatgtggactttgctgttaacacagagggcacttattctgagcctcgccccatcggcacccgttacctcacccgtaatctgtaa

SEQ ID NO: 270 - DNA, 2673 bp, Artificial Sequence
  LBV110
atggctgccgatggttatcttccggattggctcgaggacaacctctctgagggcattcgcgagtggtgggacttgaaacctggagccccgaaacccaaagccaaccagcaaaagcaggacaacggccggggtctggtgcttcctggctacaagtacctcggacccttcaacggactcgacaagggggagcccgtcaacgcggcggacgcagcggccctcgagcacgacaaggcctacgaccagcagctccaagcgggtgacaatccgtacctgcggtataaccacgccgacgccgagtttcaggagcgtctgcaagaagatacgtcttttgggggcaacctcgggcgagcagtcttccaggccaagaagcgggttctcgaacctctcggtctggttgagtctcctgtgaagacggctcctggaaagaagagaccggtagagccatcaccccagcgttctccagactcctctacgggcatcggcaagaaaggccagcagcccgcgaaaaagagactcaactttgggcagactggcgactcagagtcagtgcccgaccctcaaccaatcggagaaccccccgcaggcccctctggtctgggatctggtacaatggctgcaggcggtggcgctccaatggcagacaataacgaaggcgccgacggagtgggtagttcctcaggaaattggcattgcgattccacatggctgggcgacagagtcatcaccaccagcacccgaacctgggccctccccacctacaacaaccacctctacaagcaaatctccaacgggacttcgggaggaagcaccaacgacaacacctacttcggctacagcaccccctgggggtattttgactttaacagattccactgccacttctcaccacgtgactggcagcgactcatcaacaacaactggggattccggcccaagagactcaacttcaagctcttcaacatccaggtcaaggaggtcacgcagaatgaaggcaccaagaccatcgccaataaccttaccagcacgattcaggtctttacggactcggaataccagctcccgtacgtcctcggctctgcgcaccagggctgcctgcctccgttcccggcggacgtcttcatgattcctcagtacgggtacctgactctgaacaatggcagtcaggccgtgggccgttcctccttctactgcctggagtactttccttctcaaatgctgagaacgggcaacaactttgagttcagctacaactttgaggacgtgccttttcacagcagctacgcgcacagccaaagcctggaccggctgatgaaccccctcatcgaccagtacctgtactacctgtctcggactcagtccacgggaggtaccgcaggaactcagcagttgctattttctcaggccgggcctaataacatgtcggctcaggccaaaaactggctacccgggccctgctaccggcagcaacgcgtctccacgacactgtcgcaaaataacaacagcaacattgcctggacccgtgccaccaagtatcatctgaatggcagagactctctggtaaatcccggtgtcgctatggcaacccacaaggacgacgaagagcgattttttccgtccagcggagtcttaatgtttgggaaacagggagctggaaaagacaacgtggactatagcagcgttatgctaaccagtgaggaagaaattaaaaccaccaacccagtggccacagaacagtacggcgtggtggccgataacctgcaacagcaaggtggtggaggttcaggaggcggtggttctggcggaggaggtagtggtggcggtggatcaggcggaggtggaagtgaggtccaactccaggcaagcggaggaggattcgttcaagctggcggttctcttcgattgtcctgtgctgtatccggacgaggtgatctcagcacgcctagctatggtatgcattgggtccgacaagcaccgggtaaagagcgcgagtttgtagcggggataagccggggtgactacaattcactctattatgctgattccgtacaaggccgctttacaatttcacgagacaatgcgaagaacaccgtttatttgcagatgaatagtctgaagcccgaagatactgcaacgtattactgcgctgaaaatagaagaggcgatttcaataacacctactgggggcaagggactcaagtcacagtttcaagcggaggcggaggtagcgccgctcctattgtaggggccgtcaacagtcaaggagccttacctggcatggtctggcagaaccgggacgtgtacctgcagggtcctatctgggccaagattcctcacacggacggaaactttcatccctcgccgctgatgggaggctttggactgaaacacccgcctcctcagatcctgattaagaatacacctgttcccgcggatcctccaactaccttcaaccaagctaagctggcgtcgttcatcacgcagtacagcaccggacaggtcagcgtggaaattgaatgggagctgcagaaagaaaacagcaaacgctggaacccagagattcaatacacttccaactactgtaaatctacaaatgtggactttgctgttaacacagagggcacttattctgagcctcgccccatcggcacccgttacctcacccgtaatctgtaa

SEQ ID NO: 271 - DNA, 2673 bp, Artificial Sequence; identical to SEQ ID NO: 270
  LBV111

SEQ ID NO: 272 - DNA, 2670 bp, Artificial Sequence; identical to SEQ ID NO: 151
  LBV112

SEQ ID NO: 273 - DNA, 2670 bp, Artificial Sequence
  LBV113
atggctgccgatggttatcttccggattggctcgaggacaaccttagtgaaggaattcgcgagtggtgggctttgaaacctggagcccctcaacccaaggcaaatcaacaacatcaagacaacgctcgaggtcttgtgcttccgggttacaaataccttggacccggcaacggactcgacaagggggagccggtcaacgcagcagacgcggcggccctcgagcacgacaaggcctacgaccagcagctcaaggccggagacaacccgtacctcaagtacaaccacgccgacgccgagttccaggagcggctcaaagaagatacgtcttttgggggcaacctcgggcgagcagtcttccaggccaaaaagaggcttcttgaacctcttggtctggttgaggaagcggctaagacggctcctggaaagaagaggcctgtagagcagtctcctcaggaaccggactcctccgcgggtattggcaaatcgggtgcacagcccgctaaaaagagactcaatttcggtcagactggcgacacagagtcagtcccagaccctcaaccaatcggagaacctcccgcagccccctcaggtgtgggatctcttacaatggcttcaggtggtggcgcaccagtggcagacaataacgaaggtgccgatggagtgggtagttcctcgggaaattggcattgcgattcccaatggctgggggacagagtcatcaccaccagcacccgaacctgggccctgcccacctacaacaatcacctctacaagcaaatctccaacagcacatctggaggatcttcaaatgacaacgcctacttcggctacagcaccccctgggggtattttgacttcaacagattccactgccacttctcaccacgtgactggcagcgactcatcaacaacaactggggattccggcctaagcgactcaacttcaagctcttcaacattcaggtcaaagaggttacggacaacaatggagtcaagaccatcgccaataaccttaccagcacggtccaggtcttcacggactcagactatcagctcccgtacgtgctcgggtcggctcacgagggctgcctcccgccgttcccagcggacgttttcatgattcctcagtacgggtatctgacgcttaatgatggaagccaggccgtgggtcgttcgtccttttactgcctggaatatttcccgtcgcaaatgctaagaacgggtaacaacttccagttcagctacgagtttgagaacgtacctttccatagcagctacgctcacagccaaagcctggaccgactaatgaatccactcatcgaccaatacttgtactatctctcaaagactattaacggttctggacagaatcaacaaacgctaaaattcagtgtggccggacccagcaacatggctgtccagggaagaaactacatacctggacccagctaccgacaacaacgtgtctcaaccactgtgactcaaaacaacattagcgaatttgcttggcctggagcttcttcttgggctctcaatggacgtaatagcttgatgaatcctggacctgctatggccagccacaaagaaggagaggaccgtttctttcctttgtctggatctttaatttttggcaaacaaggaactggaagagacaacgtggatgcggacaaagtcatgataaccaacgaagaagaaattaaaactactaacccggtagcaacggagtcctatggacaagtggccacaaaccaccagagtgcccaaggtggtggaggttcaggaggcggtggttctggcggaggaggtagtggtggcggtggatcaggcggaggtggaagtgaggtccaactccaggcaagcggaggaggattcgttcaagctggcggttctcttcgattgtcctgtgctgtatccggacgaggtgatctcagcacgcctagctatggtatgcattgggtccgacaagcaccgggtaaagagcgcgagtttgtagcggggataagccggggtgactacaattcactctattatgctgattccgtacaaggccgctttacaatttcacgagacaatgcgaagaacaccgtttatttgcagatgaatagtctgaagcccgaagatactgcaacgtattactgcgctgaaaatagaagaggcgatttcaataacacctactgggggcaagggactcaagtcacagtttcaagcggaggcggaggtagcgcacaggcgcagaccggctgggttcaaaaccaaggaatacttccgggtatggtttggcaggacagagatgtgtacctgcaaggacccatttgggccaaaattcctcacacggacggcaactttcacccttctccgctgatgggagggtttggaatgaagcacccgcctcctcagatcctcatcaaaaacacacctgtacctgcggatcctccaacggccttcaacaaggacaagctgaactctttcatcacccagtattctactggccaagtcagcgtggagatcgagtgggagctgcagaaggaaaacagcaagcgctggaacccggagatccagtacacttccaactattacaagtctaataatgttgaatttgctgttaatactgaaggtgtatatagtgaaccccgccccattggcaccagatacctgactcgtaatctgtaa

SEQ ID NO: 274 - DNA, 2670 bp, Artificial Sequence; identical to SEQ ID NO: 273
  LBV114

SEQ ID NO: 275 - DNA, 2670 bp, Artificial Sequence; identical to SEQ ID NO: 151
  LBV115

SEQ ID NO: 276 - DNA, 2670 bp, Artificial Sequence; identical to SEQ ID NO: 151
  LBV116

SEQ ID NO: 277 - DNA, 2670 bp, Artificial Sequence
  LBV117
atggctgccgatggttatcttccggattggctcgaggacaaccttagtgaaggaattcgcgagtggtgggctttgaaacctggagcccctcaacccaaggcaaatcaacaacatcaagacaacgctcgaggtcttgtgcttccgggttacaaataccttggacccggcaacggactcgacaagggggagccggtcaacgcagcagacgcggcggccctcgagcacgacaaggcctacgaccagcagctcaaggccggagacaacccgtacctcaagtacaaccacgccgacgccgagttccaggagcggctcaaagaagatacgtcttttgggggcaacctcgggcgagcagtcttccaggccaaaaagaggcttcttgaacctcttggtctggttgaggaagcggctaagacggctcctggaaagaagaggcctgtagagcagtctcctcaggaaccggactcctccgcgggtattggcaaatcgggtgcacagcccgctaaaaagagactcaatttcggtcagactggcgacacagagtcagtcccagaccctcaaccaatcggagaacctcccgcagccccctcaggtgtgggatctcttacaatggcttcaggtggtggcgcaccagtggcagacaataacgaaggtgccgatggagtgggtagttcctcgggaaattggcattgcgattcccaatggctgggggacagagtcatcaccaccagcacccgaacctgggccctgcccacctacaacaatcacctctacaagcaaatctccaacagcacatctggaggatcttcaaatgacaacgcctacttcggctacagcaccccctgggggtattttgacttcaacagattccactgccacttctcaccacgtgactggcagcgactcatcaacaacaactggggattccggcctaagcgactcaacttcaagctcttcaacattcaggtcaaagaggttacggacaacaatggagtcaagaccatcgccaataaccttaccagcacggtccaggtcttcacggactcagactatcagctcccgtacgtgctcgggtcggctcacgagggctgcctcccgccgttcccagcggacgttttcatgattcctcagtacgggtatctgacgcttaatgatggaagccaggccgtgggtcgttcgtccttttactgcctggaatatttcccgtcgcaaatgctaagaacgggtaacaacttccagttcagctacgagtttgagaacgtacctttccatagcagctacgctcacagccaaagcctggaccgactaatgaatccactcatcgaccaatacttgtactatctctcaaagactattaacggttctggacagaatcaacaaacgctaaaattcagtgtggccggacccagcaacatggctgtccagggaagaaactacatacctggacccagctaccgacaacaacgtgtctcaaccactgtgactcaaaacaacaacagcgaatttgcttggcctcgtgcttcttcttgggctctcaatggacgtaatagcttgatgaatcctggacctgctatggccagccacaaagaaggagaggaccgtttctttcctttgtctggatctttaatttttggcaaacaaggaactggaagagacaacgtggatgcggacaaagtcatgataaccaacgaagaagaaattaaaactactaacccggtagcaacggagtcctatggacaagtggccacaaaccaccagagtgcccaaggtggtggaggttcaggaggcggtggttctggcggaggaggtagtggtggcggtggatcaggcggaggtggaagtgaggtccaactccaggcaagcggaggaggattcgttcaagctggcggttctcttcgattgtcctgtgctgtatccggacgaggtgatctcagcacgcctagctatggtatgcattgggtccgacaagcaccgggtaaagagcgcgagtttgtagcggggataagccggggtgactacaattcactctattatgctgattccgtacaaggccgctttacaatttcacgagacaatgcgaagaacaccgtttatttgcagatgaatagtctgaagcccgaagatactgcaacgtattactgcgctgaaaatagaagaggcgatttcaataacacctactgggggcaagggactcaagtcacagtttcaagcggaggcggaggtagcgcacaggcgcagaccggctgggttcaaaaccaaggaatacttccgggtatggtttggcaggacagagatgtgtacctgcaaggacccatttgggccaaaattcctcacacggacggcaactttcacccttctccgctgatgggagggtttggaatgaagcacccgcctcctcagatcctcatcaaaaacacacctgtacctgcggatcctccaacggccttcaacaaggacaagctgaactctttcatcacccagtattctactggccaagtcagcgtggagatcgagtgggagctgcagaaggaaaacagcaagcgctggaacccggagatccagtacacttccaactattacaagtctaataatgttgaatttgctgttaatactgaaggtgtatatagtgaaccccgccccattggcaccagatacctgactcgtaatctgtaa

SEQ ID NO: 278 - DNA, 2670 bp, Artificial Sequence; identical to SEQ ID NO: 277
  LBV118

SEQ ID NO: 279 - DNA, 2217 bp, Artificial Sequence
  LBV120
atggctgccgatggttatcttccagattggctcgaggacaacctctctgagggcattcgcgagtggtgggacttgaaacctggagccccgaaacccaaagccaaccagcaaaagcaggacaacggccggggtctggtgcttcctggctacaagtacctcggacccttcaacggactcgacaagggggagcccgtcaacgcggcggacgcagcggccctcgagcacgacaaggcctacgaccagcagctccaagcgggtgacaatccgtacctgcggtataaccacgccgacgccgagtttcaggagcgtctgcaagaagatacgtcttttgggggcaacctcgggcgagcagtcttccaggccaagaagcgggttctcgaacctctcggtctggttgagtctcctgtgaagacggctcctggaaagaagagaccggtagagccatcaccccagcgttctccagactcctctacgggcatcggcaagaaaggccagcagcccgcgaaaaagagactcaactttgggcagactggcgactcagagtcagtgcccgaccctcaaccaatcggagaaccccccgcaggcccctctggtctgggatctggtacaatggctgcaggcggtggcgctccaatggcagacaataacgaaggcgccgacggagtgggtagttcctcaggaaattggcattgcgattccacatggctgggcgacagagtcatcaccaccagcacccgaacctgggccctccccacctacaacaaccacctctacaagcaaatctccaacgggacttcgggaggaagcaccaacgacaacacctacttcggctacagcaccccctgggggtattttgactttaacagattccactgccacttctcaccacgtgactggcagcgactcatcaacaacaactggggattccggcccaagagactcaacttcaagctcttcaacatccaggtcaaggaggtcacgcagaatgaaggcaccaagaccatcgccaataaccttaccagcacgattcaggtctttacggactcggaataccagctcccgtacgtcctcggctctgcgcaccagggctgcctgcctccgttcccggcggacgtcttcatgattcctcagtacgggtacctgactctgaacaatggcagtcaggccgtgggccgttcctccttctactgcctggagtactttccttctcaaatgctgagaacgggcaacaactttgagttcagctacaactttgaggacgtgccttttcacagcagctacgcgcacagccaaagcctggaccggctgatgaaccccctcatcgaccagtacctgtactacctgtctcggactcagtccacgggaggtaccgcaggaactcagcagttgctattttctcaggccgggcctaataacatgtcggctcaggccaaaaactggctacccgggccctgctaccggcagcaacgcgtctccacgacactgtcgcaaaataacaacagcaacattgcctggacccgtgccaccaagtatcatctgaatggcagagactctctggtaaatcccggtgtcgctatggcaacccacaaggacgacgaagagcgattttttccgtccagcggagtcttaatgtttgggaaacagggagctggaaaagacaacgtggactatagcagcgttatgctaaccagtgaggaagaaattaaaaccaccaacccagtggccacagaacagtacggcgtggtggccgataacctgcaacagcaaaacgccgctcctattgtaggggccgtcaacagtcaaggagccttacctggcatggtctggcagaaccgggacgtgtacctgcagggtcctatctgggccaagattcctcacacggacggaaactttcatccctcgccgctgatgggaggctttggactgaaacacccgcctcctcagatcctgattaagaatacacctgttcccgcggatcctccaactaccttcaaccaagctaagctggcgtcgttcatcacgcagtacagcaccggacaggtcagcgtggaaattgaatgggagctgcagaaagaaaacagcaaacgctggaacccagagattcaatacacttccaactactgtaaatctacaaatgtggactttgctgttaacacagagggcacttattctgagcctcgccccatcggcacccgttacctcacccgtaatctgtaa

SEQ ID NO: 280 - DNA, 2670 bp, Artificial Sequence; identical to SEQ ID NO: 151
  LBV121

SEQ ID NO: 281 - DNA, 1806 bp, Artificial Sequence; identical to SEQ ID NO: 181
  LBV108

SEQ ID NO: 282 - DNA, 1806 bp, Artificial Sequence; identical to SEQ ID NO: 181
  LBV109

SEQ ID NO: 283 - DNA, 1824 bp, Artificial Sequence; identical to SEQ ID NO: 221
  LBV110

SEQ ID NO: 284 - DNA, 1806 bp, Artificial Sequence
  LBV111
acggctcctggaaagaagagaccggtagagccatcaccccagcgttctccagactcctctacgggcatcggcaagaaaggccagcagcccgcgaaaaagagactcaactttgggcagactggcgactcagagtcagtgcccgaccctcaaccaatcggagaaccccccgcaggcccctctggtctgggatctggtacaatggctgcaggcggtggcgctccaatggcagacaataacgaaggcgccgacggagtgggtagttcctcaggaaattggcattgcgattccacatggctgggcgacagagtcatcaccaccagcacccgaacctgggccctccccacctacaacaaccacctctacaagcaaatctccaacgggacttcgggaggaagcaccaacgacaacacctacttcggctacagcaccccctgggggtattttgactttaacagattccactgccacttctcaccacgtgactggcagcgactcatcaacaacaactggggattccggcccaagagactcaacttcaagctcttcaacatccaggtcaaggaggtcacgcagaatgaaggcaccaagaccatcgccaataaccttaccagcacgattcaggtctttacggactcggaataccagctcccgtacgtcctcggctctgcgcaccagggctgcctgcctccgttcccggcggacgtcttcatgattcctcagtacgggtacctgactctgaacaatggcagtcaggccgtgggccgttcctccttctactgcctggagtactttccttctcaaatgctgagaacgggcaacaactttgagttcagctacaactttgaggacgtgccttttcacagcagctacgcgcacagccaaagcctggaccggctgatgaaccccctcatcgaccagtacctgtactacctgtctcggactcagtccacgggaggtaccgcaggaactcagcagttgctattttctcaggccgggcctaataacatgtcggctcaggccaaaaactggctacccgggccctgctaccggcagcaacgcgtctccacgacactgtcgcaaaataacaacagcaacattgcctggacccgtgccaccaagtatcatctgaatggcagagactctctggtaaatcccggtgtcgctatggcaacccacaaggacgacgaagagcgattttttccgtccagcggagtcttaatgtttgggaaacagggagctggaaaagacaacgtggactatagcagcgttatgctaaccagtgaggaagaaattaaaaccaccaacccagtggccacagaacagtacggcgtggtggccgataacctgcaacagcaaaacgccgctcctattgtaggggccgtcaacagtcaaggagccttacctggcatggtctggcagaaccgggacgtgtacctgcagggtcctatctgggccaagattcctcacacggacggaaactttcatccctcgccgctgatgggaggctttggactgaaacacccgcctcctcagatcctgattaagaatacacctgttcccgcggatcctccaactaccttcaaccaagctaagctggcgtcgttcatcacgcagtacagcaccggacaggtcagcgtggaaattgaatgggagctgcagaaagaaaacagcaaacgctggaacccagagattcaatacacttccaactactgtaaatctacaaatgtggactttgctgttaacacagagggcacttattctgagcctcgccccatcggcacccgttacctcacccgtaatctgtaa

SEQ ID NO: 285 - DNA, 1800 bp, Artificial Sequence
  LBV112
acggctcctggaaagaagaggcctgtagagcagtctcctcaggaaccggactcctccgcgggtattggcaaatcgggtgcacagcccgctaaaaagagactcaatttcggtcagactggcgacacagagtcagtcccagaccctcaaccaatcggagaacctcccgcagccccctcaggtgtgggatctcttacaatggcttcaggtggtggcgcaccagtggcagacaataacgaaggtgccgatggagtgggtagttcctcgggaaattggcattgcgattcccaatggctgggggacagagtcatcaccaccagcacccgaacctgggccctgcccacctacaacaatcacctctacaagcaaatctccaacagcacatctggaggatcttcaaatgacaacgcctacttcggctacagcaccccctgggggtattttgacttcaacagattccactgccacttctcaccacgtgactggcagcgactcatcaacaacaactggggattccggcctaagcgactcaacttcaagctcttcaacattcaggtcaaagaggttacggacaacaatggagtcaagaccatcgccaataaccttaccagcacggtccaggtcttcacggactcagactatcagctcccgtacgtgctcgggtcggctcacgagggctgcctcccgccgttcccagcggacgttttcatgattcctcagtacgggtatctgacgcttaatgatggaagccaggccgtgggtcgttcgtccttttactgcctggaatatttcccgtcgcaaatgctaagaacgggtaacaacttccagttcagctacgagtttgagaacgtacctttccatagcagctacgctcacagccaaagcctggaccgactaatgaatccactcatcgaccaatacttgtactatctctcaaagactattaacggttctggacagaatcaacaaacgctaaaattcagtgtggccggacccagcaacatggctgtccagggaagaaactacatacctggacccagctaccgacaacaacgtgtctcaaccactgtgactcaaaacaacaacagcgaatttgcttggcctggagcttcttcttgggctctcaatggacgtaatagcttgatgaatcctggacctgctatggccagccacaaagaaggagaggaccgtttctttcctttgtctggatctttaatttttggcaaacaaggaactggaagagacaacgtggatgcggacaaagtcatgataaccaacgaagaagaaattaaaactactaacccggtagcaacggagtcctatggacaagtggccacaaaccaccagagtgcccaagcagcagcgcagaccggctgggttcaaaaccaaggaatacttccgggtatggtttggcaggacagagatgtgtacctgcaaggacccatttgggccaaaattcctcacacggacggcaactttcacccttctccgctgatgggagggtttggaatgaagcacccgcctcctcagatcctcatcaaaaacacacctgtacctgcggatcctccaacggccttcaacaaggacaagctgaactctttcatcacccagtattctactggccaagtcagcgtggagatcgagtgggagctgcagaaggaaaacagcaagcgctggaacccggagatccagtacacttccaactattacaagtctaataatgttgaatttgctgttaatactgaaggtgtatatagtgaaccccgccccattggcaccagatacctgactcgtaatctgtaa

SEQ ID NO: 286 - DNA, 1800 bp, Artificial Sequence
  LBV113
acggctcctggaaagaagaggcctgtagagcagtctcctcaggaaccggactcctccgcgggtattggcaaatcgggtgcacagcccgctaaaaagagactcaatttcggtcagactggcgacacagagtcagtcccagaccctcaaccaatcggagaacctcccgcagccccctcaggtgtgggatctcttacaatggcttcaggtggtggcgcaccagtggcagacaataacgaaggtgccgatggagtgggtagttcctcgggaaattggcattgcgattcccaatggctgggggacagagtcatcaccaccagcacccgaacctgggccctgcccacctacaacaatcacctctacaagcaaatctccaacagcacatctggaggatcttcaaatgacaacgcctacttcggctacagcaccccctgggggtattttgacttcaacagattccactgccacttctcaccacgtgactggcagcgactcatcaacaacaactggggattccggcctaagcgactcaacttcaagctcttcaacattcaggtcaaagaggttacggacaacaatggagtcaagaccatcgccaataaccttaccagcacggtccaggtcttcacggactcagactatcagctcccgtacgtgctcgggtcggctcacgagggctgcctcccgccgttcccagcggacgttttcatgattcctcagtacgggtatctgacgcttaatgatggaagccaggccgtgggtcgttcgtccttttactgcctggaatatttcccgtcgcaaatgctaagaacgggtaacaacttccagttcagctacgagtttgagaacgtacctttccatagcagctacgctcacagccaaagcctggaccgactaatgaatccactcatcgaccaatacttgtactatctctcaaagactattaacggttctggacagaatcaacaaacgctaaaattcagtgtggccggacccagcaacatggctgtccagggaagaaactacatacctggacccagctaccgacaacaacgtgtctcaaccactgtgactcaaaacaacattagcgaatttgcttggcctggagcttcttcttgggctctcaatggacgtaatagcttgatgaatcctggacctgctatggccagccacaaagaaggagaggaccgtttctttcctttgtctggatctttaatttttggcaaacaaggaactggaagagacaacgtggatgcggacaaagtcatgataaccaacgaagaagaaattaaaactactaacccggtagcaacggagtcctatggacaagtggccacaaaccaccagagtgcccaagcacaggcgcagaccggctgggttcaaaaccaaggaatacttccgggtatggtttggcaggacagagatgtgtacctgcaaggacccatttgggccaaaattcctcacacggacggcaactttcacccttctccgctgatgggagggtttggaatgaagcacccgcctcctcagatcctcatcaaaaacacacctgtacctgcggatcctccaacggccttcaacaaggacaagctgaactctttcatcacccagtattctactggccaagtcagcgtggagatcgagtgggagctgcagaaggaaaacagcaagcgctggaacccggagatccagtacacttccaactattacaagtctaataatgttgaatttgctgttaatactgaaggtgtatatagtgaaccccgccccattggcaccagatacctgactcgtaatctgtaa

SEQ ID NO: 287 - DNA, 1821 bp, Artificial Sequence
  LBV114
acggctcctggaaagaagaggcctgtagagcagtctcctcaggaaccggactcctccgcgggtattggcaaatcgggtgcacagcccgctaaaaagagactcaatttcggtcagactggcgacacagagtcagtcccagaccctcaaccaatcggagaacctcccgcagccccctcaggtgtgggatctcttacaatggcttcaggtggtggcgcaccagtggcagacaataacgaaggtgccgatggagtgggtagttcctcgggaaattggcattgcgattcccaatggctgggggacagagtcatcaccaccagcacccgaacctgggccctgcccacctacaacaatcacctctacaagcaaatctccaacagcacatctggaggatcttcaaatgacaacgcctacttcggctacagcaccccctgggggtattttgacttcaacagattccactgccacttctcaccacgtgactggcagcgactcatcaacaacaactggggattccggcctaagcgactcaacttcaagctcttcaacattcaggtcaaagaggttacggacaacaatggagtcaagaccatcgccaataaccttaccagcacggtccaggtcttcacggactcagactatcagctcccgtacgtgctcgggtcggctcacgagggctgcctcccgccgttcccagcggacgttttcatgattcctcagtacgggtatctgacgcttaatgatggaagccaggccgtgggtcgttcgtccttttactgcctggaatatttcccgtcgcaaatgctaagaacgggtaacaacttccagttcagctacgagtttgagaacgtacctttccatagcagctacgctcacagccaaagcctggaccgactaatgaatccactcatcgaccaatacttgtactatctctcaaagactattaacggttctggacagaatcaacaaacgctaaaattcagtgtggccggacccagcaacatggctgtccagggaagaaactacatacctggacccagctaccgacaacaacgtgtctcaaccactgtgactcaaaacaacattagcgaatttgcttggcctggagcttcttcttgggctctcaatggacgtaatagcttgatgaatcctggacctgctatggccagccacaaagaaggagaggaccgtttctttcctttgtctggatctttaatttttggcaaacaaggaactggaagagacaacgtggatgcggacaaagtcatgataaccaacgaagaagaaattaaaactactaacccggtagcaacggagtcctatggacaagtggccacaaaccaccagagtgcccaaagaggagactacgttggacttgcacaggcgcagaccggctgggttcaaaaccaaggaatacttccgggtatggtttggcaggacagagatgtgtacctgcaaggacccatttgggccaaaattcctcacacggacggcaactttcacccttctccgctgatgggagggtttggaatgaagcacccgcctcctcagatcctcatcaaaaacacacctgtacctgcggatcctccaacggccttcaacaaggacaagctgaactctttcatcacccagtattctactggccaagtcagcgtggagatcgagtgggagctgcagaaggaaaacagcaagcgctggaacccggagatccagtacacttccaactattacaagtctaataatgttgaatttgctgttaatactgaaggtgtatatagtgaaccccgccccattggcaccagatacctgactcgtaatctgtaa

SEQ ID NO: 288 - DNA, 1800 bp, Artificial Sequence
  LBV115
acggctcctggaaagaagaggcctgtagagcagtctcctcaggaaccggactcctccgcgggtattggcaaatcgggtgcacagcccgctaaaaagagactcaatttcggtcagactggcgacacagagtcagtcccagaccctcaaccaatcggagaacctcccgcagccccctcaggtgtgggatctcttacaatggcttcaggtggtggcgcaccagtggcagacaataacgaaggtgccgatggagtgggtagttcctcgggaaattggcattgcgattcccaatggctgggggacagagtcatcaccaccagcacccgaacctgggccctgcccacctacaacaatcacctctacaagcaaatctccaacagcacatctggaggatcttcaaatgacaacgcctacttcggctacagcaccccctgggggtattttgacttcaacagattccactgccacttctcaccacgtgactggcagcgactcatcaacaacaactggggattccggcctaagcgactcaacttcaagctcttcaacattcaggtcaaagaggttacggacaacaatggagtcaagaccatcgccaataaccttaccagcacggtccaggtcttcacggactcagactatcagctcccgtacgtgctcgggtcggctcacgagggctgcctcccgccgttcccagcggacgttttcatgattcctcagtacgggtatctgacgcttaatgatggaagccaggccgtgggtcgttcgtccttttactgcctggaatatttcccgtcgcaaatgctaagaacgggtaacaacttccagttcagctacgagtttgagaacgtacctttccatagcagctacgctcacagccaaagcctggaccgactaatgaatccactcatcgaccaatacttgtactatctctcaaagactattaacggttctggacagaatcaacaaacgctaaaattcagtgtggccggacccagcaacatggctgtccagggaagaaactacatacctggacccagctaccgacaacaacgtgtctcaaccactgtgactcaaaacaacaacagcgaatttgcttggcctggagcttcttcttgggctctcaatggacgtaatagcttgatgaatcctggacctgctatggccagccacaaagaaggagaggaccgtttctttcctttgtctggatctttaatttttggcaaacaaggaactggaagagacaacgtggatgcggacaaagtcatgataaccaacgaagaagaaattaaaactactaacccggtagcaacggagtcctatggacaagtggccacaaaccaccagcagcagaacgcagccgcgcagaccggctgggttcaaaaccaaggaatacttccgggtatggtttggcaggacagagatgtgtacctgcaaggacccatttgggccaaaattcctcacacggacggcaactttcacccttctccgctgatgggagggtttggaatgaagcacccgcctcctcagatcctcatcaaaaacacacctgtacctgcggatcctccaacggccttcaacaaggacaagctgaactctttcatcacccagtattctactggccaagtcagcgtggagatcgagtgggagctgcagaaggaaaacagcaagcgctggaacccggagatccagtacacttccaactattacaagtctaataatgttgaatttgctgttaatactgaaggtgtatatagtgaaccccgccccattggcaccagatacctgactcgtaatctgtaa

SEQ ID NO: 289 - DNA, 1821 bp, Artificial Sequence
  LBV116
acggctcctggaaagaagaggcctgtagagcagtctcctcaggaaccggactcctccgcgggtattggcaaatcgggtgcacagcccgctaaaaagagactcaatttcggtcagactggcgacacagagtcagtcccagaccctcaaccaatcggagaacctcccgcagccccctcaggtgtgggatctcttacaatggcttcaggtggtggcgcaccagtggcagacaataacgaaggtgccgatggagtgggtagttcctcgggaaattggcattgcgattcccaatggctgggggacagagtcatcaccaccagcacccgaacctgggccctgcccacctacaacaatcacctctacaagcaaatctccaacagcacatctggaggatcttcaaatgacaacgcctacttcggctacagcaccccctgggggtattttgacttcaacagattccactgccacttctcaccacgtgactggcagcgactcatcaacaacaactggggattccggcctaagcgactcaacttcaagctcttcaacattcaggtcaaagaggttacggacaacaatggagtcaagaccatcgccaataaccttaccagcacggtccaggtcttcacggactcagactatcagctcccgtacgtgctcgggtcggctcacgagggctgcctcccgccgttcccagcggacgttttcatgattcctcagtacgggtatctgacgcttaatgatggaagccaggccgtgggtcgttcgtccttttactgcctggaatatttcccgtcgcaaatgctaagaacgggtaacaacttccagttcagctacgagtttgagaacgtacctttccatagcagctacgctcacagccaaagcctggaccgactaatgaatccactcatcgaccaatacttgtactatctctcaaagactattactacgggaggtcacagctcacaaacgctaaaattcagtgtggccggacccagcaacatggctgtccagggaagaaactacatacctggacccagctaccgacaacaacgtgtctcaaccactgtgactcaaaacaacaacagcgaatttgcttggcctggagcttcttcttgggctctcaatggacgtaatagcttgatgaatcctggacctgctatggccagccacaaagaaggagaggaccgtttctttcctttgtctggatctttaatttttggcaaacaaggaactggaagagacaacgtggatgcggacaaagtcatgataaccaacgaagaagaaattaaaactactaacccggtagcaacggagtcctatggacaagtggccacaaaccaccagagtgcccaaagaggagactacgttggacttgcacaggcgcagaccggctgggttcaaaaccaaggaatacttccgggtatggtttggcaggacagagatgtgtacctgcaaggacccatttgggccaaaattcctcacacggacggcaactttcacccttctccgctgatgggagggtttggaatgaagcacccgcctcctcagatcctcatcaaaaacacacctgtacctgcggatcctccaacggccttcaacaaggacaagctgaactctttcatcacccagtattctactggccaagtcagcgtggagatcgagtgggagctgcagaaggaaaacagcaagcgctggaacccggagatccagtacacttccaactattacaagtctaataatgttgaatttgctgttaatactgaaggtgtatatagtgaaccccgccccattggcaccagatacctgactcgtaatctgtaa

SEQ ID NO: 290 - DNA, 1800 bp, Artificial Sequence
  LBV117
acggctcctggaaagaagaggcctgtagagcagtctcctcaggaaccggactcctccgcgggtattggcaaatcgggtgcacagcccgctaaaaagagactcaatttcggtcagactggcgacacagagtcagtcccagaccctcaaccaatcggagaacctcccgcagccccctcaggtgtgggatctcttacaatggcttcaggtggtggcgcaccagtggcagacaataacgaaggtgccgatggagtgggtagttcctcgggaaattggcattgcgattcccaatggctgggggacagagtcatcaccaccagcacccgaacctgggccctgcccacctacaacaatcacctctacaagcaaatctccaacagcacatctggaggatcttcaaatgacaacgcctacttcggctacagcaccccctgggggtattttgacttcaacagattccactgccacttctcaccacgtgactggcagcgactcatcaacaacaactggggattccggcctaagcgactcaacttcaagctcttcaacattcaggtcaaagaggttacggacaacaatggagtcaagaccatcgccaataaccttaccagcacggtccaggtcttcacggactcagactatcagctcccgtacgtgctcgggtcggctcacgagggctgcctcccgccgttcccagcggacgttttcatgattcctcagtacgggtatctgacgcttaatgatggaagccaggccgtgggtcgttcgtccttttactgcctggaatatttcccgtcgcaaatgctaagaacgggtaacaacttccagttcagctacgagtttgagaacgtacctttccatagcagctacgctcacagccaaagcctggaccgactaatgaatccactcatcgaccaatacttgtactatctctcaaagactattaacggttctggacagaatcaacaaacgctaaaattcagtgtggccggacccagcaacatggctgtccagggaagaaactacatacctggacccagctaccgacaacaacgtgtctcaaccactgtgactcaaaacaacaacagcgaatttgcttggcctcgtgcttcttcttgggctctcaatggacgtaatagcttgatgaatcctggacctgctatggccagccacaaagaaggagaggaccgtttctttcctttgtctggatctttaatttttggcaaacaaggaactggaagagacaacgtggatgcggacaaagtcatgataaccaacgaagaagaaattaaaactactaacccggtagcaacggagtcctatggacaagtggccacaaaccaccagagtgcccaagcacaggcgcagaccggctgggttcaaaaccaaggaatacttccgggtatggtttggcaggacagagatgtgtacctgcaaggacccatttgggccaaaattcctcacacggacggcaactttcacccttctccgctgatgggagggtttggaatgaagcacccgcctcctcagatcctcatcaaaaacacacctgtacctgcggatcctccaacggccttcaacaaggacaagctgaactctttcatcacccagtattctactggccaagtcagcgtggagatcgagtgggagctgcagaaggaaaacagcaagcgctggaacccggagatccagtacacttccaactattacaagtctaataatgttgaatttgctgttaatactgaaggtgtatatagtgaaccccgccccattggcaccagatacctgactcgtaatctgtaa

SEQ ID NO: 291 - DNA, 1821 bp, Artificial Sequence
  LBV118
acggctcctggaaagaagaggcctgtagagcagtctcctcaggaaccggactcctccgcgggtattggcaaatcgggtgcacagcccgctaaaaagagactcaatttcggtcagactggcgacacagagtcagtcccagaccctcaaccaatcggagaacctcccgcagccccctcaggtgtgggatctcttacaatggcttcaggtggtggcgcaccagtggcagacaataacgaaggtgccgatggagtgggtagttcctcgggaaattggcattgcgattcccaatggctgggggacagagtcatcaccaccagcacccgaacctgggccctgcccacctacaacaatcacctctacaagcaaatctccaacagcacatctggaggatcttcaaatgacaacgcctacttcggctacagcaccccctgggggtattttgacttcaacagattccactgccacttctcaccacgtgactggcagcgactcatcaacaacaactggggattccggcctaagcgactcaacttcaagctcttcaacattcaggtcaaagaggttacggacaacaatggagtcaagaccatcgccaataaccttaccagcacggtccaggtcttcacggactcagactatcagctcccgtacgtgctcgggtcggctcacgagggctgcctcccgccgttcccagcggacgttttcatgattcctcagtacgggtatctgacgcttaatgatggaagccaggccgtgggtcgttcgtccttttactgcctggaatatttcccgtcgcaaatgctaagaacgggtaacaacttccagttcagctacgagtttgagaacgtacctttccatagcagctacgctcacagccaaagcctggaccgactaatgaatccactcatcgaccaatacttgtactatctctcaaagactattaacggttctggacagaatcaacaaacgctaaaattcagtgtggccggacccagcaacatggctgtccagggaagaaactacatacctggacccagctaccgacaacaacgtgtctcaaccactgtgactcaaaacaacaacagcgaatttgcttggcctcgtgcttcttcttgggctctcaatggacgtaatagcttgatgaatcctggacctgctatggccagccacaaagaaggagaggaccgtttctttcctttgtctggatctttaatttttggcaaacaaggaactggaagagacaacgtggatgcggacaaagtcatgataaccaacgaagaagaaattaaaactactaacccggtagcaacggagtcctatggacaagtggccacaaaccaccagagtgcccaaagaggagactacgttggacttgcacaggcgcagaccggctgggttcaaaaccaaggaatacttccgggtatggtttggcaggacagagatgtgtacctgcaaggacccatttgggccaaaattcctcacacggacggcaactttcacccttctccgctgatgggagggtttggaatgaagcacccgcctcctcagatcctcatcaaaaacacacctgtacctgcggatcctccaacggccttcaacaaggacaagctgaactctttcatcacccagtattctactggccaagtcagcgtggagatcgagtgggagctgcagaaggaaaacagcaagcgctggaacccggagatccagtacacttccaactattacaagtctaataatgttgaatttgctgttaatactgaaggtgtatatagtgaaccccgccccattggcaccagatacctgactcgtaatctgtaa

SEQ ID NO: 292 - DNA, 1821 bp, Artificial Sequence
  LBV121
acggctcctggaaagaagaggcctgtagagcagtctcctcaggaaccggactcctccgcgggtattggcaaatcgggtgcacagcccgctaaaaagagactcaatttcggtcagactggcgacacagagtcagtcccagaccctcaaccaatcggagaacctcccgcagccccctcaggtgtgggatctcttacaatggcttcaggtggtggcgcaccagtggcagacaataacgaaggtgccgatggagtgggtagttcctcgggaaattggcattgcgattcccaatggctgggggacagagtcatcaccaccagcacccgaacctgggccctgcccacctacaacaatcacctctacaagcaaatctccaacagcacatctggaggatcttcaaatgacaacgcctacttcggctacagcaccccctgggggtattttgacttcaacagattccactgccacttctcaccacgtgactggcagcgactcatcaacaacaactggggattccggcctaagcgactcaacttcaagctcttcaacattcaggtcaaagaggttacggacaacaatggagtcaagaccatcgccaataaccttaccagcacggtccaggtcttcacggactcagactatcagctcccgtacgtgctcgggtcggctcacgagggctgcctcccgccgttcccagcggacgttttcatgattcctcagtacgggtatctgacgcttaatgatggaagccaggccgtgggtcgttcgtccttttactgcctggaatatttcccgtcgcaaatgctaagaacgggtaacaacttccagttcagctacgagtttgagaacgtacctttccatagcagctacgctcacagccaaagcctggaccgactaatgaatccactcatcgaccaatacttgtactatctctcaaagactattaacggttctggacagaatcaacaaacgctaaaattcagtgtggccggacccagcaacatggctgtccagggaagaaactacatacctggacccagctaccgacaacaacgtgtctcaaccactgtgactcaaaacaacaacagcgaatttgcttggcctggagcttcttcttgggctctcaatggacgtaatagcttgatgaatcctggacctgctatggccagccacaaagaaggagaggaccgtttctttcctttgtctggatctttaatttttggcaaacaaggaactggaagagacaacgtggatgcggacaaagtcatgataaccaacgaagaagaaattaaaactactaacccggtagcaacggagtcctatggacaagtggccacaaaccaccagagtgcccaaagaggagactacgttggacttgcacaggcgcagaccggctgggttcaaaaccaaggaatacttccgggtatggtttggcaggacagagatgtgtacctgcaaggacccatttgggccaaaattcctcacacggacggcaactttcacccttctccgctgatgggagggtttggaatgaagcacccgcctcctcagatcctcatcaaaaacacacctgtacctgcggatcctccaacggccttcaacaaggacaagctgaactctttcatcacccagtattctactggccaagtcagcgtggagatcgagtgggagctgcagaaggaaaacagcaagcgctggaacccggagatccagtacacttccaactattacaagtctaataatgttgaatttgctgttaatactgaaggtgtatatagtgaaccccgccccattggcaccagatacctgactcgtaatctgtaa

SEQ ID NO: 293 - protein, 738 aa, Artificial Sequence
  Wild-type AAV Rh74
MAADGYLPDWLEDNLSEGIREWWDLKPGAPKPKANQQKQDNGRGLVLPGYKYLGPFNGLDKGEPVNAADAAALEHDKAYDQQLQAGDNPYLRYNHADAEFQERLQEDTSFGGNLGRAVFQAKKRVLEPLGLVESPVKTAPGKKRPVEPSPQRSPDSSTGIGKKGQQPAKKRLNFGQTGDSESVPDPQPIGEPPAGPSGLGSGTMAAGGGAPMADNNEGADGVGSSSGNWHCDSTWLGDRVITTSTRTWALPTYNNHLYKQISNGTSGGSTNDNTYFGYSTPWGYFDFNRFHCHFSPRDWQRLINNNWGFRPKRLNFKLFNIQVKEVTQNEGTKTIANNLTSTIQVFTDSEYQLPYVLGSAHQGCLPPFPADVFMIPQYGYLTLNNGSQAVGRSSFYCLEYFPSQMLRTGNNFEFSYNFEDVPFHSSYAHSQSLDRLMNPLIDQYLYYLSRTQSTGGTAGTQQLLFSQAGPNNMSAQAKNWLPGPCYRQQRVSTTLSQNNNSNFAWTGATKYHLNGRDSLVNPGVAMATHKDDEERFFPSSGVLMFGKQGAGKDNVDYSSVMLTSEEEIKTTNPVATEQYGVVADNLQQQNAAPIVGAVNSQGALPGMVWQNRDVYLQGPIWAKIPHTDGNFHPSPLMGGFGLKHPPPQILIKNTPVPADPPTTFNQAKLASFITQYSTGQVSVEIEWELQKENSKRWNPEIQYTSNYYKSTNVDFAVNTEGTYSEPRPIGTRYLTRNL

SEQ ID NO: 294 - protein, 735 aa, Artificial Sequence [sequence omitted]

SEQ ID NO: 295 - protein, 736 aa, Artificial Sequence
  Wild-type AAV9
MAADGYLPDWLEDNLSEGIREWWALKPGAPQPKANQQHQDNARGLVLPGYKYLGPGNGLDKGEPVNAADAAALEHDKAYDQQLKAGDNPYLKYNHADAEFQERLKEDTSFGGNLGRAVFQAKKRLLEPLGLVEEAAKTAPGKKRPVEQSPQEPDSSAGIGKSGAQPAKKRLNFGQTGDTESVPDPQPIGEPPAAPSGVGSLTMASGGGAPVADNNEGADGVGSSSGNWHCDSQWLGDRVITTSTRTWALPTYNNHLYKQISNSTSGGSSNDNAYFGYSTPWGYFDFNRFHCHFSPRDWQRLINNNWGFRPKRLNFKLFNIQVKEVTDNNGVKTIANNLTSTVQVFTDSDYQLPYVLGSAHEGCLPPFPADVFMIPQYGYLTLNDGSQAVGRSSFYCLEYFPSQMLRTGNNFQFSYEFENVPFHSSYAHSQSLDRLMNPLIDQYLYYLSKTINGSGQNQQTLKFSVAGPSNMAVQGRNYIPGPSYRQQRVSTTVTQNNNSEFAWPGASSWALNGRNSLMNPGPAMASHKEGEDRFFPLSGSLIFGKQGTGRDNVDADKVMITNEEEIKTTNPVATESYGQVATNHQSAQAQAQTGWVQNQGILPGMVWQDRDVYLQGPIWAKIPHTDGNFHPSPLMGGFGMKHPPPQILIKNTPVPADPPTAFNKDKLNSFITQYSTGQVSVEIEWELQKENSKRWNPEIQYTSNYYKSNNVEFAVNTEGVYSEPRPIGTRYLTRNL

SEQ ID NO: 296 - protein, 738 aa, Artificial Sequence
  Wild-type AAV Rh10
MAADGYLPDWLEDNLSEGIREWWDLKPGAPKPKANQQKQDDGRGLVLPGYKYLGPFNGLDKGEPVNAADAAALEHDKAYDQQLKAGDNPYLRYNHADAEFQERLQEDTSFGGNLGRAVFQAKKRVLEPLGLVEEGAKTAPGKKRPVEPSPQRSPDSSTGIGKKGQQPAKKRLNFGQTGDSESVPDPQPIGEPPAGPSGLGSGTMAAGGGAPMADNNEGADGVGSSSGNWHCDSTWLGDRVITTSTRTWALPTYNNHLYKQISNGTSGGSTNDNTYFGYSTPWGYFDFNRFHCHFSPRDWQRLINNNWGFRPKRLNFKLFNIQVKEVTQNEGTKTIANNLTSTIQVFTDSEYQLPYVLGSAHQGCLPPFPADVFMIPQYGYLTLNNGSQAVGRSSFYCLEYFPSQMLRTGNNFEFSYQFEDVPFHSSYAHSQSLDRLMNPLIDQYLYYLSRTQSTGGTAGTQQLLFSQAGPNNMSAQAKNWLPGPCYRQQRVSTTLSQNNNSNFAWTGATKYHLNGRDSLVNPGVAMATHKDDEERFFPSSGVLMFGKQGAGKDNVDYSSVMLTSEEEIKTTNPVATEQYGVVADNLQQQNAAPIVGAVNSQGALPGMVWQNRDVYLQGPIWAKIPHTDGNFHPSPLMGGFGLKHPPPQILIKNTPVPADPPTTFSQAKLASFITQYSTGQVSVEIEWELQKENSKRWNPEIQYTSNYYKSTNVDFAVNTDGTYSEPRPIGTRYLTRNL

SEQ ID NO: 297 - DNA, 2217 bp, Artificial Sequence
  Wild-type AAV Rh74
atggctgccgatggttatcttccagattggctcgaggacaacctctctgagggcattcgcgagtggtgggacttgaaacctggagccccgaaacccaaagccaaccagcaaaagcaggacaacggccggggtctggtgcttcctggctacaagtacctcggacccttcaacggactcgacaagggggagcccgtcaacgcggcggacgcagcggccctcgagcacgacaaggcctacgaccagcagctccaagcgggtgacaatccgtacctgcggtataaccacgccgacgccgagtttcaggagcgtctgcaagaagatacgtcttttgggggcaacctcgggcgagcagtcttccaggccaagaagcgggttctcgaacctctcggtctggttgagtctcctgtgaagacggctcctggaaagaagagaccggtagagccatcaccccagcgttctccagactcctctacgggcatcggcaagaaaggccagcagcccgcgaaaaagagactcaactttgggcagactggcgactcagagtcagtgcccgaccctcaaccaatcggagaaccccccgcaggcccctctggtctgggatctggtacaatggctgcaggcggtggcgctccaatggcagacaataacgaaggcgccgacggagtgggtagttcctcaggaaattggcattgcgattccacatggctgggcgacagagtcatcaccaccagcacccgaacctgggccctccccacctacaacaaccacctctacaagcaaatctccaacgggacttcgggaggaagcaccaacgacaacacctacttcggctacagcaccccctgggggtattttgactttaacagattccactgccacttctcaccacgtgactggcagcgactcatcaacaacaactggggattccggcccaagagactcaacttcaagctcttcaacatccaggtcaaggaggtcacgcagaatgaaggcaccaagaccatcgccaataaccttaccagcacgattcaggtctttacggactcggaataccagctcccgtacgtcctcggctctgcgcaccagggctgcctgcctccgttcccggcggacgtcttcatgattcctcagtacgggtacctgactctgaacaatggcagtcaggccgtgggccgttcctccttctactgcctggagtactttccttctcaaatgctgagaacgggcaacaactttgagttcagctacaactttgaggacgtgccttttcacagcagctacgcgcacagccaaagcctggaccggctgatgaaccccctcatcgaccagtacctgtactacctgtctcggactcagtccacgggaggtaccgcaggaactcagcagttgctattttctcaggccgggcctaataacatgtcggctcaggccaaaaactggctacccgggccctgctaccggcagcaacgcgtctccacgacactgtcgcaaaataacaacagcaactttgcctggaccggtgccaccaagtatcatctgaatggcagagactctctggtaaatcccggtgtcgctatggcaacccacaaggacgacgaagagcgattttttccgtccagcggagtcttaatgtttgggaaacagggagctggaaaagacaacgtggactatagcagcgttatgctaaccagtgaggaagaaattaaaaccaccaacccagtggccacagaacagtacggcgtggtggccgataacctgcaacagcaaaacgccgctcctattgtaggggccgtcaacagtcaaggagccttacctggcatggtctggcagaaccgggacgtgtacctgcagggtcctatctgggccaagattcctcacacggacggaaactttcatccctcgccgctgatgggaggctttggactgaaacacccgcctcctcagatcctgattaagaatacacctgttcccgcggatcctccaactaccttcaaccaagctaagctggcgtcgttcatcacgcagtacagcaccggacaggtcagcgtggaaattgaatgggagctgcagaaagaaaacagcaaacgctggaacccagagattcaatacacttccaactactacaaatctacaaatgtggactttgctgttaacacagagggcacttattctgagcctcgccccatcggcacccgttacctcacccgtaatctgtaa

SEQ ID NO: 298 - DNA, 2208 bp, Artificial Sequence
  Wild-type AAV2
atggctgccgatggttatcttccagattggctcgaggacactctctctgaaggaataagacagtggtggaagctcaaacctggcccaccaccaccaaagcccgcagagcggcataaggacgacagcaggggtcttgtgcttcctgggtacaagtacctcggacccttcaacggactcgacaagggagagccggtcaacgaggcagacgccgcggccctcgagcacgacaaagcctacgaccggcagctcgacagcggagacaacccgtacctcaagtacaaccacgccgacgcggagtttcaggagcgccttaaagaagatacgtcttttgggggcaacctcggacgagcagtcttccaggcgaaaaagagggttcttgaacctctgggcctggttgaggaacctgttaagacggctccgggaaaaaagaggccggtagagcactctcctgtggagccagactcctcctcgggaaccggaaaggcgggccagcagcctgcaagaaaaagattgaattttggtcagactggagacgcagactcagtacctgacccccagcctctcggacagccaccagcagccccctctggtctgggaactaatacgatggctacaggcagtggcgcaccaatggcagacaataacgagggcgccgacggagtgggtaattcctcgggaaattggcattgcgattccacatggatgggcgacagagtcatcaccaccagcacccgaacctgggccctgcccacctacaacaaccacctctacaaacaaatttccagccaatcaggagcctcgaacgacaatcactactttggctacagcaccccttgggggtattttgacttcaacagattccactgccacttttcaccacgtgactggcaaagactcatcaacaacaactggggattccgacccaagagactcaacttcaagctctttaacattcaagtcaaagaggtcacgcagaatgacggtacgacgacgattgccaataaccttaccagcacggttcaggtgtttactgactcggagtaccagctcccgtacgtcctcggctcggcgcatcaaggatgcctcccgccgttcccagcagacgtcttcatggtgccacagtatggatacctcaccctgaacaacgggagtcaggcagtaggacgctcttcattttactgcctggagtactttccttctcagatgctgcgtaccggaaacaactttaccttcagctacacttttgaggacgttcctttccacagcagctacgctcacagccagagtctggaccgtctcatgaatcctctcatcgaccagtacctgtattacttgagcagaacaaacactccaagtggaaccaccacgcagtcaaggcttcagttttctcaggccggagcgagtgacattcgggaccagtctaggaactggcttcctggaccctgttaccgccagcagcgagtatcaaagacatctgcggataacaacaacagtgaatactcgtggactggagctaccaagtaccacctcaatggcagagactctctggtgaatccgggcccggccatggcaagccacaaggacgatgaagaaaagttttttcctcagagcggggttctcatctttgggaagcaaggctcagagaaaacaaatgtggacattgaaaaggtcatgattacagacgaagaggaaatcaggacaaccaatcccgtggctacggagcagtatggttctgtatctaccaacctccagagaggcaacagacaagcagctaccgcagatgtcaacacacaaggcgttcttccaggcatggtctggcaggacagagatgtgtaccttcaggggcccatctgggcaaagattccacacacggacggacattttcacccctctcccctcatgggtggattcggacttaaacaccctcctccacagattctcatcaagaacaccccggtacctgcgaatccttcgaccaccttcagtgcggcaaagtttgcttccttcatcacacagtactccacgggacaggtcagcgtggagatcgagtgggagctgcagaaggaaaacagcaaacgctggaatcccgaaattcagtacacttccaactacaacaagtctgttaatgtggactttactgtggacactaatggcgtgtattcagagcctcgccccattggcaccagatacctgactcgtaatctgtaa

SEQ ID NO: 299 - DNA, 2208 bp, Artificial Sequence
  Wild-type AAV9
atggctgccgatggttatcttccagattggctcgaggacaaccttagtgaaggaattcgcgagtggtgggctttgaaacctggagcccctcaacccaaggcaaatcaacaacatcaagacaacgctcgaggtcttgtgcttccgggttacaaataccttggacccggcaacggactcgacaagggggagccggtcaacgcagcagacgcggcggccctcgagcacgacaaggcctacgaccagcagctcaaggccggagacaacccgtacctcaagtacaaccacgccgacgccgagttccaggagcggctcaaagaagatacgtcttttgggggcaacctcgggcgagcagtcttccaggccaaaaagaggcttcttgaacctcttggtctggttgaggaagcggctaagacggctcctggaaagaagaggcctgtagagcagtctcctcaggaaccggactcctccgcgggtattggcaaatcgggtgcacagcccgctaaaaagagactcaatttcggtcagactggcgacacagagtcagtcccagaccctcaaccaatcggagaacctcccgcagccccctcaggtgtgggatctcttacaatggcttcaggtggtggcgcaccagtggcagacaataacgaaggtgccgatggagtgggtagttcctcgggaaattggcattgcgattcccaatggctgggggacagagtcatcaccaccagcacccgaacctgggccctgcccacctacaacaatcacctctacaagcaaatctccaacagcacatctggaggatcttcaaatgacaacgcctacttcggctacagcaccccctgggggtattttgacttcaacagattccactgccacttctcaccacgtgactggcagcgactcatcaacaacaactggggattccggcctaagcgactcaacttcaagctcttcaacattcaggtcaaagaggttacggacaacaatggagtcaagaccatcgccaataaccttaccagcacggtccaggtcttcacggactcagactatcagctcccgtacgtgctcgggtcggctcacgagggctgcctcccgccgttcccagcggacgttttcatgattcctcagtacgggtatctgacgcttaatgatggaagccaggccgtgggtcgttcgtccttttactgcctggaatatttcccgtcgcaaatgctaagaacgggtaacaacttccagttcagctacgagtttgagaacgtacctttccatagcagctacgctcacagccaaagcctggaccgactaatgaatccactcatcgaccaatacttgtactatctctcaaagactattaacggttctggacagaatcaacaaacgctaaaattcagtgtggccggacccagcaacatggctgtccagggaagaaactacatacctggacccagctaccgacaacaacgtgtctcaaccactgtgactcaaaacaacaacagcgaatttgcttggcctggagcttcttcttgggctctcaatggacgtaatagcttgatgaatcctggacctgctatggccagccacaaagaaggagaggaccgtttctttcctttgtctggatctttaatttttggcaaacaaggaactggaagagacaacgtggatgcggacaaagtcatgataaccaacgaagaagaaattaaaactactaacccggtagcaacggagtcctatggacaagtggccacaaaccaccagagtgcccaagcacaggcgcagaccggctgggttcaaaaccaaggaatacttccgggtatggtttggcaggacagagatgtgtacctgcaaggacccatttgggccaaaattcctcacacggacggcaactttcacccttctccgctgatgggagggtttggaatgaagcacccgcctcctcagatcctcatcaaaaacacacctgtacctgcggatcctccaacggccttcaacaaggacaagctgaactctttcatcacccagtattctactggccaagtcagcgtggagatcgagtgggagctgcagaaggaaaacagcaagcgctggaacccggagatccagtacacttccaactattacaagtctaataatgttgaatttgctgttaatactgaaggtgtatatagtgaaccccgccccattggcaccagatacctgactcgtaatctg

SEQ ID NO: 300 - DNA, 2217 bp, Artificial Sequence
  Wild-type AAV Rh10
atggctgccgatggttatcttccagattggctcgaggacaacctctctgagggcattcgcgagtggtgggacttgaaacctggagccccgaaacccaaagccaaccagcaaaagcaggacgacggccggggtctggtgcttcctggctacaagtacctcggacccttcaacggactcgacaagggggagcccgtcaacgcggcggacgcagcggccctcgagcacgacaaggcctacgaccagcagctcaaagcgggtgacaatccgtacctgcggtataaccacgccgacgccgagtttcaggagcgtctgcaagaagatacgtcttttgggggcaacctcgggcgagcagtcttccaggccaagaagcgggttctcgaacctctcggtctggttgaggaaggcgctaagacggctcctggaaagaagagaccggtagagccatcaccccagcgttctccagactcctctacgggcatcggcaagaaaggccagcagcccgcgaaaaagagactcaactttgggcagactggcgactcagagtcagtgcccgaccctcaaccaatcggagaaccccccgcaggcccctctggtctgggatctggtacaatggctgcaggcggtggcgctccaatggcagacaataacgaaggcgccgacggagtgggtagttcctcaggaaattggcattgcgattccacatggctgggcgacagagtcatcaccaccagcacccgaacctgggccctccccacctacaacaaccacctctacaagcaaatctccaacgggacttcgggaggaagcaccaacgacaacacctacttcggctacagcaccccctgggggtattttgactttaacagattccactgccacttctcaccacgtgactggcagcgactcatcaacaacaactggggattccggcccaagagactcaacttcaagctcttcaacatccaggtcaaggaggtcacgcagaatgaaggcaccaagaccatcgccaataaccttaccagcacgattcaggtctttacggactcggaataccagctcccgtacgtcctcggctctgcgcaccagggctgcctgcctccgttcccggcggacgtcttcatgattcctcagtacgggtacctgactctgaacaatggcagtcaggccgtgggccgttcctccttctactgcctggagtactttccttctcaaatgctgagaacgggcaacaactttgagttcagctaccagtttgaggacgtgccttttcacagcagctacgcgcacagccaaagcctggaccggctgatgaaccccctcatcgaccagtacctgtactacctgtctcggactcagtccacgggaggtaccgcaggaactcagcagttgctattttctcaggccgggcctaataacatgtcggctcaggccaaaaactggctacccgggccctgctaccggcagcaacgcgtctccacgacactgtcgcaaaataacaacagcaactttgcctggaccggtgccaccaagtatcatctgaatggcagagactctctggtaaatcccggtgtcgctatggcaacccacaaggacgacgaagagcgattttttccgtccagcggagtcttaatgtttgggaaacagggagctggaaaagacaacgtggactatagcagcgttatgctaaccagtgaggaagaaattaaaaccaccaacccagtggccacagaacagtacggcgtggtggccgataacctgcaacagcaaaacgccgctcctattgtaggggccgtcaacagtcaaggagccttacctggcatggtctggcagaaccgggacgtgtacctgcagggtcctatctgggccaagattcctcacacggacggaaactttcatccctcgccgctgatgggaggctttggactgaaacacccgcctcctcagatcctgattaagaatacacctgttcccgcggatcctccaactaccttcagtcaagctaagctggcgtcgttcatcacgcagtacagcaccggacaggtcagcgtggaaattgaatgggagctgcagaaagaaaacagcaaacgctggaacccagagattcaatacacttccaactactacaaatctacaaatgtggactttgctgttaacacagatggcacttattctgagcctcgccccatcggcacccgttacctcacccgtaatctgtaa

SEQ ID NO: 301 - protein, 35 aa, Artificial Sequence
  INSR peptide
SLEEEWAQVECEVYGRGCPSGSLDESFYDWFERQL

SEQ ID NO: 302 - protein, 96 aa, Artificial Sequence
  Colq peptide
TPFYPVGYTVKQPGTCGDGVLQPGEECDDGNPDVSDGCIDCHRAYCGDGYRHQGVEDCDGSDFGYLTCETYLPGSYGDLRCTQYCSIDSTPCRYFT

SEQ ID NO: 303 - protein, 7 aa, Artificial Sequence
  RGD peptide
RGDLGLS

SEQ ID NO: 304 - protein, 7 aa, Artificial Sequence
  RGD peptide
RGDLSTP

SEQ ID NO: 305 - protein, 10 aa, Artificial Sequence
  RGD peptide
SNSRGDYNSL

SEQ ID NO: 306 - protein, 10 aa, Artificial Sequence
  RGD peptide
ENRRGDFNNT

SEQ ID NO: 307 - protein, 8 aa, Artificial Sequence
  RGD peptide
SRGDYNSL

SEQ ID NO: 308 - protein, 7 aa, Artificial Sequence
  RGD peptide
RGDYNSL

SEQ ID NO: 309 - protein, 6 aa, Artificial Sequence
  RGD peptide
RGDLST

SEQ ID NO: 310 - protein, 7 aa, Artificial Sequence
  RGD peptide
RGDYVGL

SEQ ID NO: 311 - protein, 4 aa, Artificial Sequence
  GGGS linker
GGGS

SEQ ID NO: 312 - protein, 10 aa, Artificial Sequence
  GGGS linker
GGGGSGGGGS

SEQ ID NO: 313 - protein, 15 aa, Artificial Sequence
  GGGS linker
GGGGSGGGGSGGGGS

SEQ ID NO: 314 - protein, 20 aa, Artificial Sequence
  GGGS linker
GGGGSGGGGSGGGGSGGGGS

SEQ ID NO: 315 - protein, 25 aa, Artificial Sequence
  GGGS linker
GGGGSGGGGSGGGGSGGGGSGGGGS

SEQ ID NO: 316 - protein, 123 aa, Artificial Sequence
  VHH RGD
EVQLQASGGGFVQAGGSLRLSCAVSGRGDLSTPSYGMHWVRQAPGKEREFVAGISRGDYNSLYYADSVQGRFTISRDNAKNTVYLQMNSLKPEDTATYYCAENRRGDFNNTYWGQGTQVTVSS

SEQ ID NO: 317 - protein, 47 aa, Artificial Sequence
  GP2 RGD
KFWATVGRGDLSTPFEVPVYAETLDEALELAENRRGDFNNTVTRVRP

SEQ ID NO: 318 - protein, 62 aa, Artificial Sequence
  GP2 RGD
GGGGSGGGGSKFWATVGRGDLSTPFEVPVYAETLDEALELAENRRGDFNNTVTRVRPGGGGS

SEQ ID NO: 319 - protein, 29 aa, Artificial Sequence
  knottin RGD
NSRGDYNSLSCSQDSDCLAGCVCGPNGFC

SEQ ID NO: 320 - protein, 48 aa, Artificial Sequence
  knotting RGD
GGGGSGGGGSGCSNSRGDYNSLSCSQDSDCLAGCVCGPNGFCGGGGGS

SEQ ID NO: 321 - protein, 17 aa, Artificial Sequence
  RGD cyclic peptide
ACRGDYNSLCRGDLSTC

SEQ ID NO: 322 - protein, 26 aa, Artificial Sequence
  RGD cyclic peptide
GGGGACRGDYNSLCRGDLSTCGGGGS

We claim:

1. A modified AAV capsid protein comprising a modified variable region (VR) VIII.

2. The modified AAV capsid protein of claim 1, wherein the capsid protein is a VP1, VP2, or VP3 capsid protein.

3. The modified AAV capsid protein of claim 1, wherein the modified VR VIII comprises a peptide insertion.

4. The modified AAV capsid protein of claim 3, wherein the peptide insertion comprises an RGD-motif peptide insertion.

5. The modified AAV capsid protein of claim 4, wherein the RGD-motif insertion comprises RGDLGLS (SEQ ID NO: 303), RGDLSTP (SEQ ID NO: 304), SNSRGDYNSL (SEQ ID NO: 305), ENRRGDFNNT (SEQ ID NO: 306), SRGDYNSL (SEQ ID NO: 307), RGDYNSL (SEQ ID NO: 308), RGDLST (SEQ ID NO: 309), or RGDYVGL (SEQ ID NO: 310).

6. The modified AAV capsid protein of claim 4, wherein the RGD-motif insertion comprises a variable domain of camelid heavy-chain-only antibody (VHH) RGD peptide.

7. The modified AAV capsid protein of claim 6, wherein the VHH RGD peptide comprises an amino acid sequence at least 85%, 90%, 95%, 96%, 97%, 98%, 99% or 100% identical to the amino acid sequence EVQLQASGGGFVQAGGSLRLSCAVSGRGDLSTPSYGMHWVRQAPGKEREFVAGISR GDYNSLYYADSVQGRFTISRDNAKNTVYLQMNSLKPEDTATYYCAENRRGDFNNT YWGQGTQVTVSS (SEQ ID NO: 316).

8. The modified AAV capsid protein of claim 3, wherein the peptide insertion comprises an acetylcholinesterase collagenic tail (ColQ) peptide.

9. The modified AAV capsid protein of claim 8, wherein the ColQ peptide comprises an amino acid sequence at least 85%, 90%, 95%, 96%, 97%, 98%, 99% or 100% identical to the amino acid sequence TPFYPVGYTVKQPGTCGDGVLQPGEECDDGNPDVSDGCIDCHRAYCGDGYRHQGV EDCDGSDFGYLTCETYLPGSYGDLRCTQYCSIDSTPCRYFT (SEQ ID NO: 302).

10. The modified AAV capsid protein of claim 3, wherein the peptide insertion comprises one or more linker sequences at the N-terminus or C-terminus of the inserted peptide.

11. The modified AAV capsid protein of claim 8, wherein the linker sequence comprises GGGGS (SEQ ID NO: 311), GGGGSGGGGS (SEQ ID NO: 312); GGGGSGGGGSGGGGS(SEQ ID NO: 313); GGGGSGGGGSGGGGSGGGGS (SEQ ID NO: 314); or GGGGSGGGGSGGGGSGGGGSGGGGS (SEQ ID NO: 315).

12. The modified AAV capsid protein of claim 1, wherein the AAV serotype is AAV9 or AAVRh74.

13. The modified AAV capsid protein of claim 1, further comprising one or more amino acid mutations.

14. The modified AAV capsid protein of claim 13, wherein the one or more amino acid mutations reduce liver transduction.

15. The modified AAV capsid protein of claim 13, wherein the mutations comprise:
i) at least one of F503I, G507I, Y707C, and/or Y708C of Rh74, or
ii) N498I of AAV9.

16. The modified AAV capsid protein of any one of the preceding claims, wherein the capsid protein comprises an amino acid sequence at least 85%, 90%, 95%, 96%, 97%, 98%, 99% or 100% identical to the amino acid sequence set forth in any one of SEQ ID NOs: 53, 75, 102, 124, 245, 249, 255, 258, 262, or 267.

17. A modified AAV capsid protein comprising an amino acid sequence at least 85%, 90%, 95%, 96%, 97%, 98%, 99% or 100% identical to the amino acid sequence set forth in any one of SEQ ID NOs: 53, 75, 102, 124, 245, 249, 255, 258, 262, or 267.

18. The modified AAV capsid protein of claim 17, wherein the capsid protein is encoded by a nucleic acid sequence at least 85%, 90%, 95%, 96%, 97%, 98%, 99% or 100% identical to the amino acid sequence set forth in any one of SEQ ID NOs: 151, 173, 199, 221, 270, 274, 280, 283, 287, or 292.

19. An AAV capsid comprising one or more AAV capsid proteins according to any one of claims 1-18.

20. The AAV capsid of claim 19, wherein the AAV capsid has enhanced transduction in a targeted tissue or cell type relative to other tissue or cell types.

21. The AAV capsid of claim 20, wherein the targeted tissue type is muscular tissue or muscle cells.

22. The AAV capsid of claim 20, wherein the AAV capsid has enhanced transduction in muscle tissue.

23. The AAV capsid of claim 19, wherein the AAV capsid has reduced transduction in non-targeted tissues or cell types.

24. The AAV capsid of claim 23, wherein the non-targeted tissues include liver, lung, kidney, brain, spleen, intestine, spinal cord, or reproductive organs.

25. The AAV capsid of claim 19, wherein the transduction in muscle tissue is enhanced by at least about 10%, about 20%, about 30%, about 40%, about 50%, about 100%, about 200%, or about 300% compared the parental and/or unmodified AAV capsid.

26. The AAV capsid of claim 19, wherein the capsid comprises:
i) a VP1 capsid protein comprising an amino acid sequence at least 85%, 90%, 95%, 96%, 97%, 98%, 99% or 100% identical to the amino acid sequence set forth in SEQ ID NO: 53; and
ii) a VP2/VP3 capsid protein comprising an amino acid sequence at least 85%, 90%, 95%, 96%, 97%, 98%, 99% or 100% identical to the amino acid sequence set forth in SEQ ID NO: 102.

27. The AAV capsid of claim 19, wherein the capsid comprises:
i) a VP1 capsid protein comprising an amino acid sequence at least 85%, 90%, 95%, 96%, 97%, 98%, 99% or 100% identical to the amino acid sequence set forth in SEQ ID NO: 75; and
ii) a VP2/VP3 capsid protein comprising an amino acid sequence at least 85%, 90%, 95%, 96%, 97%, 98%, 99% or 100% identical to the amino acid sequence set forth in SEQ ID NO: 124.

28. The AAV capsid of claim 19, wherein the capsid comprises:
i) a VP1 capsid protein comprising an amino acid sequence at least 85%, 90%, 95%, 96%, 97%, 98%, 99% or 100% identical to the amino acid sequence set forth in SEQ ID NO: 245; and
ii) a VP2/VP3 capsid protein comprising an amino acid sequence at least 85%, 90%, 95%, 96%, 97%, 98%, 99% or 100% identical to the amino acid sequence set forth in SEQ ID NO: 258.

29. The AAV capsid of claim 19, wherein the capsid comprises:
i) a VP1 capsid protein comprising an amino acid sequence at least 85%, 90%, 95%, 96%, 97%, 98%, 99% or 100% identical to the amino acid sequence set forth in SEQ ID NO: 249; and
ii) a VP2/VP3 capsid protein comprising an amino acid sequence at least 85%, 90%, 95%, 96%, 97%, 98%, 99% or 100% identical to the amino acid sequence set forth in SEQ ID NO: 262.

30. The AAV capsid of claim 19, wherein the capsid comprises:
i) a VP1 capsid protein comprising an amino acid sequence at least 85%, 90%, 95%, 96%, 97%, 98%, 99% or 100% identical to the amino acid sequence set forth in SEQ ID NO: 255; and
ii) a VP2/VP3 capsid protein comprising an amino acid sequence at least 85%, 90%, 95%, 96%, 97%, 98%, 99% or 100% identical to the amino acid sequence set forth in SEQ ID NO: 267.

31. A vector comprising a nucleic acid sequence encoding a modified AAV capsid protein of claim 1.

32. The vector of claim 31, wherein the nucleic acid sequence encoding a modified AAV capsid protein is operably linked to regulatory element that controls expression of the capsid protein in a host cell.

33. An AAV viral vector comprising the modified capsid protein of any one of claims 1-18 or the AAV capsid of claim 18.

34. The AAV viral vector of claim 33, wherein the AAV viral vector comprises a recombinant AAV (rAAV) vector encoding a therapeutic transgene or nucleotide sequence of interest (NOI).

35. A cell comprising the vector of claim 31 or the AAV viral vector of claim 33.

36. A pharmaceutical composition comprising the AAV viral vector of claim 33 and at least one pharmaceutically acceptable excipient and/or additive.

37. A method of providing a therapeutic transgene or protein to a subject, comprising administering to the subject the AAV viral vector of claim 33 or the pharmaceutical composition of claim 36.

38. A method of treating a subject having a disease and/or disorder, the method comprising administering to the subject at least one therapeutically effective amount of the AAV viral vector of claim 33 or the pharmaceutical composition of claim 36.

39. The method of claim 38, wherein the disease and/or disorder is a muscular and/or neuromuscular disorder.

40. The method of claim 39, wherein the muscular and/or neuromuscular disorder is muscular dystrophy or myotonic dystrophy.

41. The method of any one of claims 37-40, wherein the AAV viral vector or the pharmaceutical composition is administered to the subject intravenously, intrathecally, intracerebrally, intraventricularly, intranasally, intratracheally, intra-aurally, intra-ocularly, or peri-ocularly, orally, rectally, transmucosally, inhalationally, transdermally, parenterally, subcutaneously, intradermally, intramuscularly, intracisternally, intranervally, intrapleurally, topically, intralymphatically, intracisternally or intranerve.
